(19) United States
(12) Patent Application Publication
(10) Pub. No.: US 2013/0164256 A1
(43) Pub. Date: Jun. 27, 2013

(54) IMMUNOBINDERS DIRECTED AGAINST TNF

(71) Applicants: Chung-Ming Hsieh, Newton, MA (US); Tariq Ghayur, Holliston, MA (US); Lorenzo Benatuil, Northborough, MA (US); Yuliya Kutskova, Northborough, MA (US); John Memmott, Framingham, MA (US); Jennifer Perez, Worcester, MA (US); Suju Zhong, Shrewsbury, MA (US); Carrie Goodreau, Ludlow, MA (US); Anca Clabbers, Rutland, MA (US)

(72) Inventors: Chung-Ming Hsieh, Newton, MA (US); Tariq Ghayur, Holliston, MA (US); Lorenzo Benatuil, Northborough, MA (US); Yuliya Kutskova, Northborough, MA (US); John Memmott, Framingham, MA (US); Jennifer Perez, Worcester, MA (US); Suju Zhong, Shrewsbury, MA (US); Carrie Goodreau, Ludlow, MA (US); Anca Clabbers, Rutland, MA (US)

(73) Assignee: ABBVIE INC., North Chicago, IL (US)

(21) Appl. No.: 13/659,658

(22) Filed: Oct. 24, 2012

Related U.S. Application Data
(60) Provisional application No. 61/550,587, filed on Oct. 24, 2011.

(51) Int. Cl. C07K 16/24; A61K 45/06; A61K 47/48; A61K 39/395; C07K 16/46; G01N 33/68

(52) U.S. Cl. CPC C07K 16/241; C07K 16/464; G01N 33/6863; A61K 47/48546; A61K 39/3955; A61K 45/06
USPC 424/85.2; 530/389.2; 530/387.3; 530/388.23; 435/188; 530/391.3; 530/391.7; 536/23.53; 435/320.1; 435/328; 435/335; 435/252.3; 435/419; 435/254.2; 435/69.6; 424/158.1; 424/133.1; 435/7.92; 435/7.1; 436/501

(57) ABSTRACT

Isolated binding proteins, e.g., antibodies or antigen binding portions thereof, which bind to tumor necrosis factor-alpha (TNF-α), e.g., human TNF-α, and related antibody-based compositions and molecules are disclosed. Also disclosed are pharmaceutical compositions comprising the antibodies, as well as therapeutic and diagnostic methods for using the antibodies.

### CROSS-REFERENCE TO RELATED APPLICATIONS

[0001] This application claims priority to U.S. Provisional Application Ser. No. 61/550,587, filed Oct. 24, 2011, which is incorporated herein by reference in its entirety.

### BACKGROUND OF THE INVENTION

[0002] 1. Field of the Invention

[0003] TNF-α binding proteins and their uses in the prevention and/or treatment of acute and chronic immunological diseases are provided.

[0004] 2. Background of the Invention

[0005] There is a need in the art for improved binding proteins capable of binding TNF-α (also referred to as tumor necrosis factor, tumor necrosis factor-alpha, tumor necrosis factor-α, TNF, and cachectin). Provided are a novel family of binding proteins, CDR grafted binding proteins, humanized binding proteins, and fragments thereof, capable of binding TNF-α with high affinity and neutralizing TNF-α.

### BRIEF SUMMARY OF THE INVENTION

[0006] TNF-α binding proteins, or antigen-binding portions thereof, that bind TNF-α are provided. In an embodiment, the antigen binding domain comprises the VH region chosen from any one of SEQ ID NOs: 22, 24, 26, 28, 30, 32, 34-58, 74-83, 94-266, 478-486, 496-675, 738-762, 778-956, 1053-1062, 1073, 1075, and 1077, or one, two, or three CDRs therefrom. In another embodiment, the antigen binding domain comprises the VL region chosen from any one of SEQ ID NOs: 23, 25, 27, 29, 31, 33, 59-73, 84-93, 267-477, 487-495, 676-737, 763-777, 957-1052, 1063-1072, 1074, 1076, and 1078, or one, two, or three CDRs therefrom. In a particular embodiment, the antigen binding domain comprises a VH region and a VL region, for example, wherein the VH region comprises SEQ ID NOs: 22, 24, 26, 28, 30, 32, 34-58, 74-83, 94-266, 478-486, 496-675, 738-762, 778-956, 1053-1062, 1073, 1075, and 1077, or one, two, or three CDRs therefrom, and the VL region comprises SEQ ID NOs: 23, 25, 27, 29, 31, 33, 59-73, 84-93, 267-477, 487-495, 676-737, 763-777, 957-1052, 1063-1072, 1074, 1076, and 1078, or one, two, or three CDRs therefrom.

[0007] In an embodiment, the binding protein binds TNF-α. In another embodiment, the binding protein modulates a biological function of TNF-α. In another embodiment, the binding protein neutralizes TNF-α. In yet another embodiment, the binding protein diminishes the ability of TNF-α to bind to its receptor, for example, the binding protein diminishes the ability of pro-human TNF-α, mature-human TNF-α, or truncated-human TNF-α to bind to its receptor. In yet another embodiment, the binding protein reduces one or more TNF-α biological activities selected from: TNF-dependent cytokine production; TNF-dependent cell killing; TNF-dependent inflammation; TNF-dependent bone erosion; and TNF-dependent cartilage damage.

[0008] In an embodiment, the binding protein has an on rate constant (Kₒₙ) selected from: at least about 10² M⁻¹s⁻¹; at least about 10³ M⁻¹s⁻¹; at least about 10⁴ M⁻¹s⁻¹; at least about 10⁵ M⁻¹s⁻¹; and at least about 10⁶ M⁻¹s⁻¹; as measured by surface plasmon resonance. In another embodiment, the binding protein has an off rate constant (K_{off}) selected from: at most about 10⁻³ s⁻¹; at most about 10⁻⁴ s⁻¹; at most about 10⁻⁵ s⁻¹; and at most about 10⁻⁶ s⁻¹, as measured by surface plasmon resonance. In yet another embodiment, the binding protein has a dissociation constant (K_{D}) selected from: at most about 10⁻⁷ M; at most about 10⁻⁸ M; at most about 10⁻⁹ M; at most about 10⁻¹⁰ M; at most about 10⁻¹¹ M; at most about 10⁻¹² M; and at most 10⁻¹³ M.

[0009] In another aspect, a method for treating a mammal is provided comprising administering to the mammal an effective amount of the pharmaceutical composition disclosed herein. In another embodiment, a method for reducing human TNF-α activity is provided, the method comprising: contacting human TNF-α with the binding protein disclosed herein such that human TNF-α activity is reduced. In another embodiment, provided is a method for reducing human TNF-α activity in a human subject suffering from a disorder in which TNF-α activity is detrimental, the method comprising administering to the human subject the binding protein disclosed herein such that human TNF-α activity in the human subject is reduced. In another embodiment, provided is a method for treating a subject for a disease or a disorder in which TNF-α activity is detrimental, the method comprising administering to the subject the binding protein disclosed herein such that treatment is achieved.

[0010] In one embodiment, the method treats diseases involving immune and inflammatory elements, such as autoimmune diseases, particularly those associated with inflammation, including Crohn's disease, psoriasis (including plaque psoriasis), arthritis (including rheumatoid arthritis, psoratic arthritis, osteoarthritis, or juvenile idiopathic arthritis), multiple sclerosis, and ankylosing spondylitis. Therefore, the binding proteins herein may be used to treat these disorders.

### DETAILED DESCRIPTION OF THE INVENTION

[0011] Provided are TNF-α binding proteins, or antigen-binding portions thereof, that bind TNF-α, pharmaceutical compositions thereof, as well as nucleic acids, recombinant expression vectors and host cells for making such binding proteins and fragments. Also provided are methods of using the binding proteins disclosed herein to detect human TNF-α, to inhibit human TNF-α either in vitro or in vivo, and to regulate gene expression or TNF-α related functions.

[0012] Unless otherwise defined herein, scientific and technical terms used in connection with the present disclosure shall have the meanings that are commonly understood by those of ordinary skill in the art. The meaning and scope of the terms should be clear, however, in the event of any latent ambiguity, definitions provided herein take precedent over any dictionary or extrinsic definition. Further, unless otherwise required by context, singular terms shall include pluralities and plural terms shall include the singular. In this application, the use of “or” means “and/or”, unless stated otherwise. Furthermore, the use of the term “including”, as well as other forms of the term, such as “includes” and “included”, is not limiting. Also, terms such as “element” or “component” encompass both elements and components comprising one unit and elements and components that comprise more than one subunit unless specifically stated otherwise.

[0013] Generally, nomenclatures used in connection with, and techniques of, cell and tissue culture, pathology, oncology, molecular biology, immunology, microbiology, genetics and protein and nucleic acid chemistry and hybridization described herein are those well known and commonly used in the art. The methods and techniques of the present disclosure are generally performed according to conventional methods well known in the art and as described in various general and more specific references that are cited and discussed throughout the present specification unless otherwise indicated. See, e.g., Sambrook et al. Molecular Cloning: A Laboratory Manual (2d ed., Cold Spring Harbor Laboratory Press, Cold Spring Harbor, N.Y. (1989)). Enzymatic reactions and purification techniques are performed according to manufacturer's specifications, as commonly accomplished in the art or as described herein. The nomenclatures used in connection with, and the laboratory procedures and techniques of, analytical chemistry, synthetic organic chemistry, and medicinal and pharmaceutical chemistry described herein are those well known and commonly used in the art. Standard techniques are used for chemical syntheses, chemical analyses, pharmaceutical preparation, formulation, and delivery, and treatment of patients.

[0014] The term “human TNF-α” (abbreviated herein as hTNF-α) includes a trimeric cytokine protein. The term includes a homotrimeric protein comprising three 17.5 kD TNF-α proteins. The homotrimeric protein is referred to as a “TNF-α protein”. The term human “TNF-α” is intended to include recombinant human TNF-α (rhTNF-α), which can be prepared by standard recombinant expression methods. The sequence of human TNF-α is shown in Table 1.

TABLE 1
Sequence of Human TNF-α

| Pro- | Sequence | Sequence |
|---|---|---|
| tein | Identifier | 12345678901234567890123456789012 |
| Human | SEQ ID | VRSSSRTPSDKPVAHVVANPQAEGQLQWLNDR |
| TNF-α | NO.: 1 | ANALLANGVELRDNQLVVPSEGLYLIYSQVLF |
| | | KGQGCPSTHVLLTHTISRIAVSYQTKVNLLSA |
| | | IKSPCQRETPEGAEAKPWYEPIYLGGVFQLEK |
| | | GDRLSAEINRPDYLDFAESGQVYFGIIAL |

[0015] The term “antibody”, broadly refers to any immunoglobulin (Ig) molecule, or antigen binding portion thereof, comprised of four polypeptide chains, two heavy (H) chains and two light (L) chains, or any functional fragment, mutant, variant, or derivation thereof, which retains the essential epitope binding features of an Ig molecule. Such mutant, variant, or derivative antibody formats are known in the art.

[0016] In a full-length antibody, each heavy chain is comprised of a heavy chain variable region (abbreviated herein as HCVR or VH) and a heavy chain constant region. The heavy chain constant region is comprised of three domains, CH1, CH2 and CH3. Each light chain is comprised of a light chain variable region (abbreviated herein as LCVR or VL) and a light chain constant region. The light chain constant region is comprised of one domain, CL. The VH and VL regions can be further subdivided into regions of hypervariability, termed complementarity determining regions (CDR), interspersed with regions that are more conserved, termed framework regions (FR). Each VH and VL is composed of three CDRs and four FRs, arranged from amino-terminus to carboxy-terminus in the following order: FR1, CDR1, FR2, CDR2, FR3, CDR3, FR4. Immunoglobulin molecules can be of any type (e.g., IgG, IgE, IgM, IgD, IgA and IgY), class (e.g., IgG 1, IgG2, IgG 3, IgG4, IgA1 and IgA2) or subclass.

[0017] The term “antigen-binding portion” or “antigen-binding region” of a binding protein (or simply “binding protein portion”), refers to one or more fragments of a binding protein that retain the ability to specifically bind to an antigen (e.g., hTNF-α). The antigen-binding function of a binding protein can be performed by fragments of a full-length binding protein. Such binding protein embodiments may also have bispecific, dual specific, or multi-specific formats; specifically binding to two or more different antigens. Examples of binding fragments encompassed within the term “antigen-binding portion” of a binding protein include (i) a Fab fragment, a monovalent fragment consisting of the VL, VH, CL and CH1 domains; (ii) a F(ab′)₂ fragment, a bivalent fragment comprising two Fab fragments linked by a disulfide bridge at the hinge region; (iii) a Fd fragment consisting of the VH and CH1 domains; (iv) a Fv fragment consisting of the VL and VH domains of a single arm of an antibody, (v) a dAb fragment (Ward et al. (1989) Nature 341:544-546, Winter et al., PCT publication WO 90/05144 A1), which comprises a single variable domain; and (vi) an isolated complementarity determining region (CDR). Furthermore, although the two domains of the Fv fragment, VL and VH, are coded for by separate genes, they can be joined, using recombinant methods, by a synthetic linker that enables them to be made as a single protein chain in which the VL and VH regions pair to form monovalent molecules (known as single chain Fv (scFv); see, e.g., Bird et al. (1988) Science 242:423-426; and Huston et al. (1988) Proc. Natl. Acad. Sci. USA 85:5879-5883). Such single chain binding proteins are also intended to be encompassed within the term “antigen-binding portion” of a binding protein. Other forms of single chain binding proteins, such as diabodies are also encompassed. Diabodies are bivalent, bispecific binding proteins in which VH and VL domains are expressed on a single polypeptide chain, but using a linker that is too short to allow for pairing between the two domains on the same chain, thereby forcing the domains to pair with complementary domains of another chain and creating two antigen binding sites (see, e.g., Holliger, et al. (1993) Proc. Natl. Acad. Sci. USA 90:6444-6448; Poljak, et al. (1994) Structure 2:1121-1123).

[0018] The term “binding protein” refers to a polypeptide comprising one or more antigen-binding portions disclosed herein optionally linked to a linker polypeptide or a constant domain. Linker polypeptides comprise two or more amino acid residues joined by peptide bonds and are used to link one or more antigen binding portions. Such linker polypeptides are well known in the art (see e.g., Holliger, et al. (1993) Proc. Natl. Acad. Sci. USA 90:6444-6448; Poljak, et al. (1994) Structure 2:1121-1123). A constant domain refers to a heavy or light chain constant domain. Human IgG heavy chain and light chain constant domain amino acid sequences are known in the art and represented in Table 2.

TABLE 2
Sequence of Human IgG Heavy Chain Constant
Domain and Light Chain Constant Domain

| | Sequence | Sequence |
|---|---|---|
| Protein | Identifier | 12345678901234567890123456789012 |
| Ig gamma-1 | SEQ ID NO.: 2 | ASTKGPSVFFLAPSSKSTSGGTAALGCLVKDY |
| constant region | | FPEPVTVSWNSGALTSGVHTFPAVLQSSGLYS |
| | | LSSVVTVPSSSLGTQTYICNVNHKPSNTKVDK |
| | | KVEPKSCDKTHTCPPCPAPELLGGPSVFLFPP |
| | | KPKDTLMISRTPEVTCVVVDVSHEDPEVKFNW |
| | | YVDGVEVHNAKTKPREEQYNSTYRVVSVLTVL |
| | | HQDWLNGKEYKCKVSNKALPAPIEKTISKAKG |
| | | QPREPQVYTLPPSREEMTKNQVSLTCLVKGFY |
| | | PSDIAVEWESNGQPENNYKTTPPVLDSDGSFF |
| | | LYSKLTVDKSRWQQGNVFSCSVMHEALHNHYT |
| | | QKSLSLSPGK |
| Ig gamma-1 | SEQ ID NO.: 3 | ASTKGPSVFPLAPSSKSTSGGTAALGCLVKDY |
| constant region | | FPEPVTVSWNSGALTSGVHTFPAVLQSSGLYS |
| mutant | | LSSVVTVPSSSLGTQTYICNVNHKPSNTKVDK |
| | | KVEPKSCDKTHTCPPCPAPEAAGGPSVFLFPP |
| | | KPKDTLMISRTPEVTCVVVDVSHEDPEVKFNW |
| | | YVDGVEVHNAKTKPREEQYNSTYRVVSVLTVL |
| | | HQDWLNGKEYKCKVSNKALPAPIEKTISKAKG |
| | | QPREPQVYTLPPSREEMTKNQVSLTCLVKGFY |
| | | PSDIAVEWESNGQPENNYKTTPPVLDSDGSFF |
| | | LYSKLTVDKSRWQQGNVFSCSVMHEALHNHYT |
| | | QKSLSLSPGK |
| Ig Kappa constant | SEQ ID NO.: 4 | TVAAPSVFIFPPSDEQLKSGTASVVCLLNNFY |
| region | | PREAKVQWKVDNALQSGNSQESVTEQDSKDST |
| | | YSLSSTLTLSKADYEKHKVYACEVTHQGLSSP |
| | | VTKSFNRGEC |
| Ig Lambda | SEQ ID NO.: 5 | QPKAAPSVTLFPPSSEELQANKATLVCLISDF |
| constant region | | YPGAVTVAWKADSSPVKAGVETTTPSKQSNNK |
| | | YAASSYLSLTPEQWKSHRSYSCQVTHEGSTVE |
| | | KTVAPTECS |

[0019] A binding protein, or antigen-binding portion thereof, may be part of a larger immunoadhesion molecule, formed by covalent or noncovalent association of the binding protein or binding protein portion with one or more other proteins or peptides. Examples of such immunoadhesion molecules include use of the streptavidin core region to make a tetrameric scFv molecule (Kipriyanov, et al. (1995) Hum. Antibod. Hybridomas 6:93-101) and use of a cysteine residue, a marker peptide and a C-terminal polyhistidine tag to make bivalent and biotinylated scFv molecules (Kipriyanov, et al. (1994) Mol. Immunol. 31:1047-1058). Antibody portions, such as Fab and F(ab′)₂ fragments, can be prepared from whole antibodies using conventional techniques, such as papain or pepsin digestion, respectively, of whole antibodies. Moreover, binding proteins, binding protein portions and immunoadhesion molecules can be obtained using standard recombinant DNA techniques, as described herein.

[0020] An “isolated binding protein” refers to a binding protein, or antigen-binding portion thereof, that is substantially free of other binding proteins having different antigenic specificities (e.g., an isolated binding protein that specifically binds hTNF-α is substantially free of binding proteins that specifically bind antigens other than hTNF-α). An isolated binding protein that specifically binds hTNF-α may, however, have cross-reactivity to other antigens, such as TNF-α molecules from other species. Moreover, an isolated binding protein may be substantially free of other cellular material and/or chemicals.

[0021] The term “human binding protein” includes binding proteins, or antigen-binding portion thereof, that having variable and constant regions derived from human germline immunoglobulin sequences. The human binding proteins disclosed herein may include amino acid residues not encoded by human germline immunoglobulin sequences (e.g., mutations introduced by random or site-specific mutagenesis in vitro or by somatic mutation in vivo), for example in the CDRs and in particular CDR3. However, the term “human binding protein”, is not intended to include binding proteins in which CDR sequences derived from the germline of another mammalian species, such as a mouse, have been grafted onto human framework sequences.

[0022] The terms “Kabat numbering”, “Kabat definitions” and “Kabat labeling” are used interchangeably herein. These terms, which are recognized in the art, refer to a system of numbering amino acid residues which are more variable (i.e., hypervariable) than other amino acid residues in the heavy and light chain variable regions of an antibody, or an antigen binding portion thereof (Kabat et al. (1971) Ann. NY Acad. Sci. 190:382-391 and Kabat, et al. (1991) Sequences of Proteins of Immunological Interest, Fifth Edition, U.S. Department of Health and Human Services, NIH Publication No. 91-3242). See also, Martin, “Protein Sequence and Structure Analysis of Antibody Variable Domains,” In Kontermann and Dübel, eds., Antibody Engineering (Springer-Verlag, Berlin, 2001), Chapter 31, especially pages 432-433. For the heavy chain variable region, the hypervariable region ranges from amino acid positions 31 to 35 for CDR1, amino acid positions 50 to 65 for CDR2, and amino acid positions 95 to 106 for CDR3. For the light chain variable region, the hypervariable region ranges from amino acid positions 24 to 34 for CDR1, amino acid positions 50 to 56 for CDR2, and amino acid positions 89 to 97 for CDR3.

[0023] The term “CDR” refers to the complementarity determining region within antibody variable sequences. There are three CDRs in each of the variable regions of the heavy chain and the light chain, which are designated CDR1, CDR2 and CDR3, for each of the variable regions. The term “CDR set” refers to a group of three CDRs that occur in a single variable region capable of binding the antigen. The exact boundaries of these CDRs have been defined differently according to different systems. The system described by Kabat (Kabat et al., Sequences of Proteins of Immunological Interest (National Institutes of Health, Bethesda, Md. (1987) and (1991)) not only provides an unambiguous residue numbering system applicable to any variable region of an antibody, but also provides precise residue boundaries defining the three CDRs. These CDRs may be referred to as Kabat CDRs. Chothia and coworkers (Chothia and Lesk (1987) J. Mol. Biol. 196:901-917) and Chothia et al. (1989) Nature 342:877-883) found that certain sub-portions within Kabat CDRs adopt nearly identical peptide backbone conformations, despite having great diversity at the level of amino acid sequence. These sub-portions were designated as L1, L2 and L3 or H1, H2 and H3 where the “L” and the “H” designates the light chain and the heavy chains regions, respectively. These regions may be referred to as Chothia CDRs, which have boundaries that overlap with Kabat CDRs. Other boundaries defining CDRs overlapping with the Kabat CDRs have been described by Padlan (1995) FASEB J. 9:133-139 and MacCallum (1996) J. Mol. Biol. 262(5):732-745. Still other CDR boundary definitions may not strictly follow one of the above systems, but will nonetheless overlap with the Kabat CDRs, although they may be shortened or lengthened in light of prediction or experimental findings that particular residues or groups of residues or even entire CDRs do not significantly impact antigen binding. The methods used herein may utilize CDRs defined according to any of these systems, although particular embodiments use Kabat or Chothia defined CDRs.

[0024] Human heavy chain and light chain acceptor sequences are known in the art. In one embodiment of the disclosure the human heavy chain and light chain acceptor sequences are selected from the sequences listed from V-base (hvbase.mrc-cpe.cam.ac.uk/) or from IMGT®, the international ImMunoGeneTics information system® (himgt.cines.fr/textes/IMGTrepertoire/LocusGenes/). In another embodiment of the disclosure the human heavy chain and light chain acceptor sequences are selected from the sequences described in Table 3 and Table 4, respectively.

TABLE 3
Heavy Chain Acceptor Sequences

| SEQ | Protein | Sequence |
|---|---|---|
| ID No. | region | 12345678901234567890123456789012 |
| SEQ ID | VH4-59 FR1 | QVQLQESGPGLVKPSETLSLTCTVSGGSISS |
| NO: 6 | | |
| SEQ ID | VH4-59 FR2 | WIRQPPGKGLEWIG |
| NO: 7 | | |
| SEQ ID | VH4-59 FR3 | RVTISVDTSKNQFSLKLSSVTAADTAVYYCAR |
| NO: 8 | | |
| SEQ ID | VH3-53 FR1 | EVQLVESGGGLIQPGGSLRLSCAASGFTVSS |
| NO: 9 | | |
| SEQ ID | VH3-53 FR2 | WVRQAPGKGLEWVS |
| NO: 10 | | |
| SEQ ID | VH3-53 FR3 | RFTISRDNSKNTLYLQMNSLRAEDTAVYYCAR |
| NO: 11 | | |
| SEQ ID | JH1/JH4/ | WGQGTLVTVSS |
| NO: 12 | JH5 FR4 | |
| SEQ ID | JH2 FR4 | WGRGTLVTVSS |
| NO: 13 | | |
| SEQ ID | JH6 FR4 | WGQGTTVTVSS |
| NO: 14 | | |

TABLE 4
Light Chain Acceptor Sequences

| SEQ | Protein | Sequence |
|---|---|---|
| ID No. | region | 12345678901234567890123456789012 |
| SEQ ID | 1-39/O12 | DIQMTQSPSSLSASVGDRVTITC |
| NO: 15 | FR1 | |
| SEQ ID | 1-39/O12 | WYQQKPGKAPKLLIY |
| NO: 16 | FR2 | |
| SEQ ID | 1-39/O12 | GVPSRFSGSGSGTDFTLTISSLQPEDFATYYC |
| NO: 17 | FR3 | |
| SEQ ID | 3-15/L2 FR1 | EIVMTQSPATLSVSPGERATLSC |
| NO: 18 | | |
| SEQ ID | 3-15/L2 FR2 | WYQQKPGQAPRLLIY |
| NO: 19 | | |
| SEQ ID | 3-15/L2 FR3 | GIPARFSGSGSGTEFTLTISSLQSEDFAVYYC |
| NO: 20 | | |
| SEQ ID | JK2 FR4 | FGQGTKLEIKR |
| NO: 21 | | |

[0025] The term “multivalent binding protein” is used in this specification to denote a binding protein comprising two or more antigen binding sites. The multivalent binding protein may be engineered to have the three or more antigen binding sites, and is generally not a naturally occurring antibody. The term “multispecific binding protein” refers to a binding protein capable of binding two or more related or unrelated targets. Dual variable domain (DVD) binding proteins or immunoglobulins (DVD-Ig) as used herein, are binding proteins that comprise two or more antigen binding sites and are tetravalent or multivalent binding proteins. Such DVD-binding proteins may be monospecific, i.e., capable of binding one antigen or multispecific, i.e., capable of binding two or more antigens. DVD-binding proteins comprising two heavy chain DVD-Ig polypeptides and two light chain DVD-Ig polypeptides are referred to a DVD-Ig. Each half of a DVD-Ig comprises a heavy chain DVD-Ig polypeptide, and a light chain DVD-Ig polypeptide, and two antigen binding sites. Each binding site comprises a heavy chain variable domain and a light chain variable domain with a total of 6 CDRs involved in antigen binding per antigen binding site. DVD binding proteins and methods of making DVD binding proteins are disclosed in U.S. Pat. No. 7,612,181.

[0026] One aspect of the disclosure pertains to a DVD binding protein comprising binding proteins capable of binding TNF-α. In a particular embodiment, the DVD binding protein is capable of binding TNF-α and a second target.

[0027] The term “neutralizing” refers to neutralization of a biological activity of a cytokine when a binding protein specifically binds the cytokine. In a particular embodiment, binding of a neutralizing binding protein to hTNF-α results in inhibition of a biological activity of hTNF-α, e.g., the neutralizing binding protein binds hTNF-α and reduces a biologically activity of hTNF-α by at least about 20%, 40%, 60%, 80%, 85% or more Inhibition of a biological activity of hTNF-α by a neutralizing binding protein can be assessed by measuring one or more indicators of hTNF-α biological activity well known in the art. For example neutralization of the cytoxicity of TNF-α on L929 cells.

[0028] In another embodiment, the terms “agonist” or “agonizing” refer to an increase of a biological activity of TNF-α when a binding protein specifically binds TNF-α, e.g., hTNF-α. In a particular embodiment, binding of an agonizing binding protein to TNF-α results in the increase of a biological activity of TNF-α. In a particular embodiment, the agonistic binding protein binds TNF-α and increases a biologically activity of TNF-α by at least about 20%, 40%, 60%, 80%, 85%, 90%, 95, 96%, 97%, 98%, 99%, and 100%. An inhibition of a biological activity of TNF-α by an agonistic binding protein can be assessed by measuring one or more indicators of TNF-α biological activity well known in the art.

[0029] The term “activity” includes activities such as the binding specificity/affinity of a binding protein for an antigen, for example, a hTNF-α binding protein that binds to a TNF-α antigen and/or the neutralizing potency (or agonizing potency) of a binding protein, for example, a hTNF-α binding protein whose binding to hTNF-α inhibits the biological activity of hTNF-α, e.g., neutralization of the cytoxicity of TNF-α on L929 cells.

[0030] The term “surface plasmon resonance” refers to an optical phenomenon that allows for the analysis of real-time bio specific interactions by detection of alterations in protein concentrations within a biosensor matrix, for example using the BIAcore system (Pharmacia Biosensor AB, Uppsala, Sweden and Piscataway, N.J.).

[0031] The term “Kₒₙ” refers to the on rate constant for association of a binding protein (e.g., an antibody) to the antigen to form, e.g., the antibody/antigen complex as is known in the art. The “Kₒₙ” also is known by the terms “association rate constant”, or “ka”, as used interchangeably herein. This value indicating the binding rate of an antibody to its target antigen or the rate of complex formation between an antibody and antigen also is shown by the equation below:

Antibody (“Ab”)+Antigen (“Ag”)→Ab−Ag

[0032] The term “K_{off}” refers to the off rate constant for dissociation, or “dissociation rate constant”, of a binding protein (e.g., an antibody), from the, e.g., antibody/antigen complex as is known in the art. This value indicates the dissociation rate of an antibody from its target antigen or separation of Ab−Ag complex over time into free antibody and antigen as shown by the equation below:

Ab+Ag←Ab−Ag

[0033] The term “K_{D}” refers to the “equilibrium dissociation constant” and refers to the value obtained in a titration measurement at equilibrium, or by dividing the dissociation rate constant (K_{off}) by the association rate constant (Kₒₙ). The association rate constant, the dissociation rate constant and the equilibrium dissociation constant are used to represent the binding affinity of an antibody to an antigen. Methods for determining association and dissociation rate constants are well known in the art. Using fluorescence-based techniques offers high sensitivity and the ability to examine samples in physiological buffers at equilibrium. Other experimental approaches and instruments such as a BIAcore® (biomolecular interaction analysis) assay can be used (e.g., instrument available from BIAcore International AB, a GE Healthcare company, Uppsala, Sweden). Additionally, a KinExA® (Kinetic Exclusion Assay) assay, available from Sapidyne Instruments (Boise, Id.) can also be used.

I. Binding Proteins that Bind Human TNF-α

[0034] One aspect of the present disclosure provides isolated fully-human anti-human TNF binding proteins, such as monoclonal antibodies, or antigen-binding portions thereof, that bind to TNF-α with high affinity, a slow off rate and high neutralizing capacity. A second aspect of the disclosure provides affinity-matured fully-human anti-TNF binding proteins, such as monoclonal antibodies, or antigen-binding portions thereof, that bind to TNF-α with high affinity, a slow off rate and high neutralizing capacity.

[0035] A. Method of Making TNF-α Binding Proteins

[0036] The binding proteins disclosed herein may be made by any of a number of techniques known in the art.

[0037] 1. Anti-TNF-α Monoclonal Antibodies Using Transgenic Animals

[0038] In another embodiment of the disclosure, binding proteins are produced by immunizing a non-human animal comprising some, or all, of the human immunoglobulin locus with a TNF-α antigen. In a particular embodiment, the non-human animal is a XENOMOUSE transgenic mouse, an engineered mouse strain that comprises large fragments of the human immunoglobulin loci and is deficient in mouse antibody production. See, e.g., Green et al. (1994) Nature Genet. 7:13-21 and U.S. Pat. Nos. 5,916,771; 5,939,598; 5,985,615; 5,998,209; 6,075,181; 6,091,001; 6,114,598 and 6,130,364. See also PCT Publications WO 91/10741, published Jul. 25,1991; WO 94/02602, published Feb. 3, 1994; WO 96/34096 and WO 96/33735, both published Oct. 31, 1996; WO 98/16654, published Apr. 23, 1998; WO 98/24893, published Jun. 11, 1998; WO 98/50433, published Nov. 12, 1998; WO 99/45031, published Sep. 10, 1999; WO 99/53049, published Oct. 21, 1999; WO 00/09560, published Feb. 24, 2000; and WO 00/37504, published Jun. 29, 2000. The XENOMOUSE transgenic mouse produces an adult-like human repertoire of fully human antibodies, and generates antigen-specific human Mabs. The XENOMOUSE transgenic mouse contains approximately 80% of the human antibody repertoire through introduction of megabase sized, germline configuration YAC fragments of the human heavy chain loci and x light chain loci. See, Mendez et al. (1997) Nature Genet. 15:146-156; Green and Jakobovits (1998) J. Exp. Med. 188:483-495.

[0039] 2. Anti-TNF-α Monoclonal Antibodies Using Recombinant Antibody Libraries

[0040] In vitro methods also can be used to make the binding protein disclosed herein, wherein an antibody library is screened to identify an antibody having the desired binding specificity. Methods for such screening of recombinant antibody libraries are well known in the art and include methods described in, for example, U.S. Pat. No. 5,223,409; PCT Publications WO 92/18619; WO 91/17271; WO 92/20791; WO 92/15679; WO 93/01288; WO 92/01047; WO 92/09690; and WO 97/29131; Fuchs et al. (1991) Bio/Technology 9:1369-1372; Hay et al. (1992) Hum. Antibod. Hybridomas 3:81-85; Huse et al. (1989) Science 246:1275-1281; McCafferty et al. (1990) Nature 348:552-554; Griffiths et al. (1993) EMBO J. 12:725-734; Hawkins et al. (1992) J. Mol. Biol. 226:889-896; Clackson et al. (1991) Nature 352:624-628; Gram et al. (1992) Proc. Natl. Acad. Sci. USA 89:3576-3580; Garrard et al. (1991) Bio/Technology 9:1373-1377; Hoogenboom et al. (1991) Nucl. Acid Res. 19:4133-4137; and Barbas et al. (1991) Proc. Natl. Acad. Sci. USA 88:7978-7982; and U.S. Patent Publication No. 2003.0186374.

[0041] The recombinant antibody library may be from a subject immunized with TNF-α, or a portion of TNF-α. Alternatively, the recombinant antibody library may be from a naïve subject, i.e., one who has not been immunized with TNF-α, such as a human antibody library from a human subject who has not been immunized with human TNF-α. Antibodies disclosed herein are selected by screening the recombinant antibody library with the peptide comprising human TNF-α to thereby select those antibodies that recognize TNF-α. Methods for conducting such screening and selection are well known in the art, such as described in the references in the preceding paragraph. To select antibodies disclosed herein having particular binding affinities for hTNF-α, such as those that dissociate from human TNF-α with a particular k_{off} rate constant, the art-known method of surface plasmon resonance can be used to select antibodies having the desired k_{off} rate constant. To select antibodies disclosed herein having a particular neutralizing activity for hTNF-α, such as those with a particular an IC_{50,} standard methods known in the art for assessing the inhibition of hTNF-α activity may be used.

[0042] In one aspect, provided is an isolated binding protein, or an antigen-binding portion thereof, that binds TNF-α, e.g., human TNF-α. In a particular embodiment, the binding protein is a neutralizing binding protein. In various embodiments, the binding protein is a recombinant binding protein or a monoclonal antibody.

[0043] For example, the binding proteins disclosed herein can also be generated using various phage display methods known in the art. In phage display methods, functional antibody domains are displayed on the surface of phage particles which carry the polynucleotide sequences encoding them. In a particular, such phage can be utilized to display antigen-binding domains expressed from a repertoire or combinatorial antibody library (e.g., human or murine). Phage expressing an antigen binding domain that binds the antigen of interest can be selected or identified with antigen, e.g., using labeled antigen or antigen bound or captured to a solid surface or bead. Phage used in these methods are typically filamentous phage including fd and M13 binding domains expressed from phage with Fab, Fv or disulfide stabilized Fv antibody domains recombinantly fused to either the phage gene III or gene VIII protein. Examples of phage display methods that can be used to make the binding proteins disclosed herein can be found in the art.

[0044] As described in the above references, after phage selection, the binding protein coding regions from the phage can be isolated and used to generate whole binding proteins including human binding protein or any other desired antigen binding fragment, and expressed in any desired host, including mammalian cells, insect cells, plant cells, yeast, and bacteria, e.g., as described in detail below. For example, techniques to recombinantly produce Fab, Fab′ and F(ab′)₂ fragments can also be employed using methods known in the art such as those disclosed in PCT Publication WO 92/22324; Mullinax et al. (1992) BioTechniques 12(6):864-869; and Sawai et al. (1995) Am. J. Reprod. Immunol. 34:26-34; and Better et al. (1998) Science 240:1041-1043. Examples of techniques which can be used to produce single-chain Fvs and antibodies include those described in U.S. Pat. Nos. 4,946,778 and 5,258,498; Huston et al. (1991) Methods Enzymol. 203:46-88; Shu et al. (1993) Proc. Natl. Acad Sci. USA 90:7995-7999; and Skerra et al. (1998) Science 240:1038-1041.

[0045] Alternative to screening of recombinant antibody libraries by phage display, other methodologies known in the art for screening large combinatorial libraries can be applied to the identification of dual specificity binding protein disclosed herein. One type of alternative expression system is one in which the recombinant antibody library is expressed as RNA-protein fusions, as described in PCT Publication No. WO 98/31700 and in Roberts and Szostak (1997) Proc. Natl. Acad. Sci. USA 94:12297-12302. In this system, a covalent fusion is created between an mRNA and the peptide or protein that it encodes by in vitro translation of synthetic mRNAs that carry puromycin, a peptidyl acceptor antibiotic, at their 3′ end. Thus, a specific mRNA can be enriched from a complex mixture of mRNAs (e.g., a combinatorial library) based on the properties of the encoded peptide or protein, e.g., antibody, or portion thereof, such as binding of the antibody, or portion thereof, to the dual specificity antigen. Nucleic acid sequences encoding antibodies, or portions thereof, recovered from screening of such libraries can be expressed by recombinant means as described above (e.g., in mammalian host cells) and, moreover, can be subjected to further affinity maturation by either additional rounds of screening of mRNA-peptide fusions in which mutations have been introduced into the originally selected sequence(s), or by other methods for affinity maturation in vitro of recombinant antibodies, as described above.

[0046] In another approach the binding proteins disclosed herein can also be generated using yeast display methods known in the art. In yeast display methods, genetic methods are used to tether antibody domains to the yeast cell wall and display them on the surface of yeast. In particular, such yeast can be utilized to display antigen-binding domains expressed from a repertoire or combinatorial antibody library (e.g., human or murine). Examples of yeast display methods that can be used to make the binding proteins disclosed herein include those disclosed Wittrup et al. U.S. Pat. No. 6,699,658 and Frenken et al., U.S. Pat. No. 6,114,147.

[0047] B. Production of Recombinant TNF-α Binding Proteins

[0048] Binding proteins disclosed herein may be produced by any of a number of techniques known in the art. For example, expression from host cells, wherein expression vector(s) encoding the heavy and light chains is (are) transfected into a host cell by standard techniques. The various forms of the term “transfection” are intended to encompass a wide variety of techniques commonly used for the introduction of exogenous DNA into a prokaryotic or eukaryotic host cell, e.g., electroporation, calcium-phosphate precipitation, DEAE-dextran transfection and the like. Although it is possible to express the binding proteins disclosed herein in either prokaryotic or eukaryotic host cells, expression of binding protein in eukaryotic cells is contemplated, for example, in mammalian host cells, because such eukaryotic cells (and in particular mammalian cells) are more likely than prokaryotic cells to assemble and secrete a properly folded and immunologically active binding protein.

[0049] Mammalian host cells for expressing the recombinant binding proteins disclosed herein include Chinese Hamster Ovary (CHO cells) (including dhfr- CHO cells, described in Urlaub and Chasin (1980) Proc. Natl. Acad. Sci. USA 77:4216-4220, used with a DHFR selectable marker, e.g., as described in Kaufman and Sharp (1982) J. Mol. Biol. 159:601-621), NS0 myeloma cells, COS cells and SP2 cells. When recombinant expression vectors encoding binding protein genes are introduced into mammalian host cells, the binding proteins are produced by culturing the host cells for a period of time sufficient to allow for expression of the binding protein in the host cells or, in particular, secretion of the antibody into the culture medium in which the host cells are grown. Antibodies can be recovered from the culture medium using standard protein purification methods.

[0050] Host cells can also be used to produce functional binding protein fragments, such as Fab fragments or scFv molecules. It will be understood that variations on the above procedure are within the scope of the present disclosure. For example, it may be desirable to transfect a host cell with DNA encoding functional fragments of either the light chain and/or the heavy chain of a binding protein disclosed herein. Recombinant DNA technology may also be used to remove some, or all, of the DNA encoding either or both of the light and heavy chains that is not necessary for binding to the antigens of interest. The molecules expressed from such truncated DNA molecules are also encompassed by the binding proteins disclosed herein. In addition, bifunctional binding proteins may be produced in which one heavy and one light chain are a binding protein disclosed herein and the other heavy and light chain are specific for an antigen other than the antigens of interest by crosslinking a binding protein disclosed herein to a second binding protein by standard chemical crosslinking methods.

[0051] In an exemplary system for recombinant expression of a binding protein, or antigen-binding portion thereof, disclosed herein, a recombinant expression vector encoding both the heavy chain and the light chain is introduced into dhfr CHO cells by calcium phosphate-mediated transfection. Within the recombinant expression vector, the heavy and light chain genes are each operatively linked to CMV enhancer/AdMLP promoter regulatory elements to drive high levels of transcription of the genes. The recombinant expression vector also carries a DHFR gene, which allows for selection of CHO cells that have been transfected with the vector using methotrexate selection/amplification. The selected transformant host cells are cultured to allow for expression of the heavy and light chains and intact binding protein is recovered from the culture medium. Standard molecular biology techniques are used to prepare the recombinant expression vector, transfect the host cells, select for transformants, culture the host cells and recover the binding protein from the culture medium. Still further a method of synthesizing a recombinant binding protein disclosed herein is provided by culturing a host cell disclosed herein in a suitable culture medium until a recombinant binding protein disclosed herein is synthesized. The method can further comprise isolating the recombinant binding protein from the culture medium.

II. hTNF-α Binding Proteins

[0052] A. Individual Clone Sequences

[0053] Table 5 provides the VH and VL sequences of fully human anti-human TNF binding proteins, including CDRs from each VH and VL sequence.

TABLE 5
Individual Fully Human Anti-TNF-α VH Sequences

| | | | Sequence |
|---|---|---|---|
| Protein region | | | 123456789012345678901234567890 |
| AE11-1 VH | | SEQ ID NO.: 22 | EVQLVQSGAEVKKPGASVKVSCKASGYTFT |
| | | | SYDVNWVRQATGQGLEWMGWMNPNSGNTGY |
| | | | AQKFQGRVTITADESTSTAYMELSSLRSED |
| | | | TAVYYCAIFDSDYMDVWGKGTLVTVSS |
| AE11-1 VH | CDR- | Residues 31-35 | SYDVN |
| | H1 | of SEQ ID | |
| | | NO.: 22 | |
| AE11-1 VH | CDR- | Residues 50-66 | WMNPNSGNTGYAQKFQG |
| | H2 | of SEQ ID | |
| | | NO.: 22 | |
| AE11-1 VH | CDR- | Residues 99-106 | FDSDYMDV |
| | H3 | of SEQ ID | |
| | | NO.: 22 | |
| AE11-1 VL | | SEQ ID NO.: 23 | SYELTQPPSVSLSPGQTARITCSGDALPKQ |
| | | | YAYWYQQKPGQAPVLVIYKDTERPSGIPER |
| | | | FSGSSSGTTVTLTISGAQAEDEADYYCQSA |
| | | | DSSGTSWVFGGGTKLTVL |
| AE11-1 VL | CDR- | Residues 23-33 | SGDALPKQYAY |
| | L1 | of SEQ ID | |
| | | NO.: 23 | |
| AE11-1 VL | CDR- | Residues 49-55 | KDTERPS |
| | L2 | of SEQ ID | |
| | | NO.: 23 | |
| AE11-1 VL | CDR- | Residues 89-98 | SADSSGTSWV |
| | L3 | of SEQ ID | |
| | | NO.: 23 | |
| AE11-5 VH | | SEQ ID NO.: 24 | EVQLVQSGAEVKKPGSSAKVSCKASGGTFS |
| | | | SYAISWVRQAPGQGLEWMGGIIPILGTANY |
| | | | AQKFLGRVTITADESTSTVYMELSSLRSED |
| | | | TAVYYCARGLYYDPTRADYWGQGTLVTVSS |
| AE11-5 VH | CDR- | Residues 31-35 | SYAIS |
| | H1 | of SEQ ID | |
| | | NO.: 24 | |
| AE11-5 VH | CDR- | Residues 50-66 | GIIPILGTANYAQKFLG |
| | H2 | of SEQ ID | |
| | | NO.: 24 | |
| AE11-5 VH | CDR- | Residues 99-109 | GLYYDPTRADY |
| | H3 | of SEQ ID | |
| | | NO.: 24 | |
| AE11-5 VL | | SEQ ID NO.: 25 | DIVMTQSPDFHSVTPKEKVTITCRASQSIG |
| | | | SSLHWYQQKPDQSPKLLIRHASQSISGVPS |
| | | | RFSGSGSGTDFTLTIHSLEAEDAATYYCHQ |
| | | | SSSSPPPTFGQGTQVEIK |
| AE11-5 VL | CDR- | Residues 24-34 | RASQSIGSSLH |
| | L1 | of SEQ ID | |
| | | NO.: 25 | |
| AE11-5 VL | CDR- | Residues 50-56 | HASQSIS |
| | L2 | of SEQ ID | |
| | | NO.: 25 | |
| AE11-5 VL | CDR- | Residues 89-98 | HQSSSSPPPT |
| | L3 | of SEQ ID | |
| | | NO.: 25 | |
| TNF-JK1 VH | | SEQ ID NO.: 26 | EVQLVESGGGLVQPGGSLRLSCATSGFTFN |
| | | | NYWMSWVRQAPGKGLEWVANINHDESEKYY |
| | | | VDSAKGRFTISRDNAEKSLFLQMNSLRAED |
| | | | TAVYYCARIIRGRVGFDYYNYAMDVWGQGT |
| | | | LVTVSS |
| TNF-JK1 VH | CDR- | Residues 31-35 | NYWMS |
| | H1 | of SEQ ID | |
| | | NO.: 26 | |
| TNF-JK1 VH | CDR- | Residues 50-66 | NINHDESEKYYVDSAKG |
| | H2 | of SEQ ID | |
| | | NO.: 26 | |
| TNF-JK1 VH | CDR- | Residues 99-115 | IIRGRVGFDYYNYAMDV |
| | H3 | of SEQ ID | |
| | | NO.: 26 | |
| TNF-JK1 VL | | SEQ ID NO.: 27 | DIRLTQSPSPLSASVGDRVTITCRASQSIG |
| | | | NYLNWYQHKPGKAPKLLIYAASSLQSGVPS |
| | | | RFSGTGSGTDFTLTISSLQPEDFATYYCQE |
| | | | SYSLIFAGGTKVEIK |
| TNF-JK1 VL | CDR- | Residues 24-34 | RASQSIGNYLN |
| | L1 | of SEQ ID | |
| | | NO.: 27 | |
| TNF-JK1 VL | CDR- | Residues 50-56 | AASSLQS |
| | L2 | of SEQ ID | |
| | | NO.: 27 | |
| TNF-JK1 VL | CDR- | Residues 89-95 | QESYSLI |
| | L3 | of SEQ ID | |
| | | NO.: 27 | |
| TNF-Y7C VH | | SEQ ID NO.: 28 | EVQLVQSGAEVKKPGASVKVSCKTSGYTFS |
| | | | NYDINWVRQPTGQGLEWMGWMDPNNGNTGY |
| | | | AQKFVGRVTMTRDTSKTTAYLELSGLKSED |
| | | | TAVYYCARSSGSGGTWYKEYFQSWGQGTMV |
| | | | TVSS |
| TNF-Y7C VH | CDR- | Residues 31-35 | NYDIN |
| | H1 | of SEQ ID | |
| | | NO.: 28 | |
| TNF-Y7C VH | CDR- | Residues 50-66 | WMDPNNGNTGYAQKFVG |
| | H2 | of SEQ ID | |
| | | NO.: 28 | |
| TNF-Y7C VH | CDR- | Residues 99-112 | KSSGSGGTWYKEYFQS |
| | H3 | of SEQ ID | |
| | | NO.: 28 | |
| TNF-Y7C VL | | SEQ ID NO.: 29 | DIVMTQSPLSLPVTPGEPASISCRSSQSLL |
| | | | HSNGYNYLDWYLQKPGQFPQLLIYLGSYRA |
| | | | SGVPDRFSGSGSGTDFTLKISRVEAEDVGV |
| | | | YYCMQRIEFPPGTFGQGTKLGIK |
| TNF-Y7C VL | CDR- | Residues 24-39 | RSSQSLLHSNGYNYLD |
| | L1 | of SEQ ID | |
| | | NO.: 29 | |
| TNF-Y7C VL | CDR- | Residues 55-61 | LGSYRAS |
| | L2 | of SEQ ID | |
| | | NO.: 29 | |
| TNF-Y7C VL | CDR- | Residues 94-103 | MQRIEFPPGT |
| | L3 | of SEQ ID | |
| | | NO.: 29 | |
| AE11-7 VH | | SEQ ID NO.: 30 | EVQLVQSGAEVKKPGASVKVSCKTSGYSLT |
| | | | QYPIHWVRQAPGQRPEWMGWISPGNGNTKL |
| | | | SPKFQGRVTLSRDASAGTVFMDLSGLTSDD |
| | | | TAVYFCTSVDLGDHWGQGTLVTVSS |
| AE11-7 VH | CDR- | Residues 31-35 | QYPIH |
| | H1 | of SEQ ID | |
| | | NO.: 30 | |
| AE11-7 VH | CDR- | Residues 50-66 | WISPGNGNTKLSPKFQG |
| | H2 | of SEQ ID | |
| | | NO.: 30 | |
| AE11-7 VH | CDR- | Residues 99-104 | VDLGDH |
| | H3 | of SEQ ID | |
| | | NO.: 30 | |
| AE11-7 VL | | SEQ ID NO.: 31 | DIVMTQSPEFQSVTPKEKVTITCRASQSIG |
| | | | SSLHWYQQKPDQSPKLLINYASQSFSGVPS |
| | | | RFSGGGSGTDFTLTINSLEAEDAATYYCHQ |
| | | | SSNLPITFGQGTRLEIK |
| AE11-7 VL | CDR- | Residues 24-34 | RASQSIGSSLH |
| | L1 | of SEQ ID | |
| | | NO.: 31 | |
| AE11-7 VL | CDR- | Residues 50-56 | YASQSFS |
| | L2 | of SEQ ID | |
| | | NO.: 31 | |
| AE11-7 VL | CDR- | Residues 89-97 | HQSSNLPIT |
| | L3 | of SEQ ID | |
| | | NO.: 31 | |
| AE11-13 VH | | SEQ ID NO.: 32 | EVQLVESGGGLVQPGRSLRLSCAASGFTFD |
| | | | DYPMHWVRQAPGEGLEWVSGISSNSASIGY |
| | | | ADSVKGRFTISRDNAQNTLYLQMNSLGDED |
| | | | TAVYYCVSLTLGIGQGTLVTVSS |
| AE11-13 VH | CDR- | Residues 31-35 | DYPMH |
| | H1 | of SEQ ID | |
| | | NO.: 32 | |
| AE11-13 VH | CDR- | Residues 50-66 | GISSNSASIGYADSVKG |
| | H2 | of SEQ ID | |
| | | NO.: 332 | |
| AE11-13 VH | CDR- | Residues 99-102 | LTLG |
| | H3 | of SEQ ID | |
| | | NO.: 32 | |
| AE11-13 VL | | SEQ ID NO.: 33 | DIRLTQSPSSLSASVGDRVTITCRASQSIG |
| | | | NYLHWYQQKPGKAPKLLIYAASSLQSGVPS |
| | | | RFSGSGSGTDFTLTISSLQPEDFATYYCQQ |
| | | | SYSTLYSFGQGTKLEIK |
| AE11-13 VL | CDR- | Residues 24-34 | RASQSIGNYLH |
| | L1 | of SEQ ID | |
| | | NO.: 33 | |
| AE11-13 VL | CDR- | Residues 50-56 | AASSLQS |
| | L2 | of SEQ ID | |
| | | NO.: 33 | |
| AE11-13 VL | CDR- | Residues 89-97 | QQSYSTLYS |
| | L3 | of SEQ ID | |
| | | NO.: 33 | |

[0054] B. IgG Converted Clones

[0055] Table 6 provides the VH sequence of humanized anti-TNF MAK-195 antibodies that were converted into IgG clones as discussed in detail in Example 2.

TABLE 6
Humanized anti-TNF MAK-195 Ab VH sequences of
IgG converted clones

| | | | Sequence |
|---|---|---|---|
| Protein region | | | 123456789012345678901234567890 |
| A8 | | SEQ ID NO.: 34 | EVQLVESGGGLVQPGGSLRLSCAASGFTFS |
| VH | | | NYGVNWVRQAPGKGLEWVSMIAADGFTDYA |
| | | | SSVKGRFTISRDNSKNTLYLQMNSLRAEDT |
| | | | AVYYCAREWHHGPVAYWGQGTLVTVSS |
| A8 | CDR-H1 | Residues 31-35 | NYGVN |
| VH | | of SEQ ID | |
| | | NO.: 34 | |
| A8 | CDR-H2 | Residues 50-65 | MIAADGFTDYASSVKG |
| VH | | of SEQ ID | |
| | | NO.: 34 | |
| A8 | CDR-H3 | Residues 98-106 | EWHHGPVAY |
| VH | | of SEQ ID | |
| | | NO.: 34 | |
| B5 | | SEQ ID NO.: 35 | EVQLVESGGGLVQPGGSLRLSCAASGFTFS |
| VH | | | NYGVSWVRQAPGKGLEWVSLIRGDGSTDYA |
| | | | SSLKGRFTISRDNSKNTLYLQMNSLRAEDT |
| | | | AVYYCAREWHHGPVAYWGQGTLVTVSS |
| B5 | CDR-H1 | Residues 31-35 | NYGVS |
| VH | | of SEQ ID | |
| | | NO.: 35 | |
| B5 | CDR-H2 | Residues 50-65 | LIRGDGSTDYASSLKG |
| VH | | of SEQ ID | |
| | | NO.: 35 | |
| B5 | CDR-H3 | Residues 98-106 | EWHHGPVAY |
| VH | | of SEQ ID | |
| | | NO.: 35 | |
| rHC44 | | SEQ ID NO.: 36 | EVQLVESGGGLVQPGGSLRLSCAASGFTFS |
| VH | | | NYGVSWVRQAPGKGLEWVSMIWADGSTHYA |
| | | | DTLKSRFTISRDNSKNTLYLQMNSLRAEDT |
| | | | AVYYCAREWQHGPVAYWGQGTLVTVSS |
| rHC44 | CDR-H1 | Residues 31-35 | NYGVS |
| VH | | of SEQ ID | |
| | | NO.: 36 | |
| rHC44 | CDR-H2 | Residues 50-65 | MIWADGSTHYADTLKS |
| VH | | of SEQ ID | |
| | | NO.: 36 | |
| rHC44 | CDR-H3 | Residues 98-106 | EWQHGPVAY |
| VH | | of SEQ ID | |
| | | NO.: 36 | |
| rHC22 | | SEQ ID NO.: 37 | EVQLVESGGGLVQPGGSLRLSCAASGFTFS |
| VH | | | NYGVTWVRQAPGKGLEWVSMIWADGSTDYA |
| | | | DTVKGRFTISRDNSKNTLYLQMNSLRAEDT |
| | | | AVYYCAREWQHGPVAYWGQGTLVTVSS |
| rHC22 | CDR-H1 | Residues 31-35 | NYGVT |
| VH | | of SEQ ID | |
| | | NO.: 37 | |
| rHC22 | CDR-H2 | Residues 50-65 | MIWADGSTDYADTVKG |
| VH | | of SEQ ID | |
| | | NO.: 37 | |
| rHC22 | CDR-H3 | Residues 98-106 | EWQHGPVAY |
| VH | | of SEQ ID | |
| | | NO.: 37 | |
| rHC81 | | SEQ ID NO.: 38 | EVQLVESGGGLVQPGGSLRLSCAASGFTFS |
| VH | | | NYGVTWVRQAPGKGLEWVSMIWADGSTHYA |
| | | | DSVKSRFTISRDNSKNTLYLQMNSLRAEDT |
| | | | AVYYCAREWQHGPLAYWGQGTLVTVSS |
| rHC81 | CDR-H1 | Residues 31-35 | NYGVT |
| VH | | of SEQ ID | |
| | | NO.: 38 | |
| rHC81 | CDR-H2 | Residues 50-65 | MIWADGSTHYADSVKS |
| VH | | of SEQ ID | |
| | | NO.: 38 | |
| rHC81 | CDR-H3 | Residues 98-106 | EWQHGPLAY |
| VH | | of SEQ ID | |
| | | NO.: 38 | |
| rHC18 | | SEQ ID NO.: 39 | EVQLVESGGGLVQPGGSLRLSCAASGFTFS |
| VH | | | NYGVTWVRQAPGKGLEWVSMIWSDGSTDYA |
| | | | SSVKGRFTISRDNSKNTLYLQMNSLRAEDT |
| | | | AVYYCAREWQHGPVAYWGQGTLVTVSS |
| rHC18 | CDR-H1 | Residues 31-35 | NYGVT |
| VH | | of SEQ ID | |
| | | NO.: 39 | |
| rHC18 | CDR-H2 | Residues 50-65 | MIWSDGSTDYASSVKG |
| VH | | of SEQ ID | |
| | | NO.: 39 | |
| rHC18 | CDR-H3 | Residues 98-106 | EWQHGPVAY |
| VH | | of SEQ ID | |
| | | NO.: 39 | |
| rHC14 | | SEQ ID NO.: 40 | EVQLVESGGGLVQPGGSLRLSCAASGFTFS |
| VH | | | NYGVTWVRQAPGKGLEWVSMIWADGSTHYA |
| | | | SSLKGRFTISRDNSKNTLYLQMNSLRAEDT |
| | | | AVYYCAREWQHGPAAYWGQGTLVTVSS |
| rHC14 | CDR-H1 | Residues 31-35 | NYGVT |
| VH | | of SEQ ID | |
| | | NO.: 40 | |
| rHC14 | CDR-H2 | Residues 50-65 | MIWADGSTHYASSLKG |
| VH | | of SEQ ID | |
| | | NO.: 40 | |
| rHC14 | CDR-H3 | Residues 98-106 | EWQHGPAAY |
| VH | | of SEQ ID | |
| | | NO.: 40 | |
| rHC3 | | SEQ ID NO.: 41 | EVQLVESGGGLVQPGGSLRLSCAASGFTFS |
| VH | | | NYGVSWVRQAPGKGLEWVSMIWADGSTHYA |
| | | | SSLKGRFTISRDNSKNTLYLQMNSLRAEDT |
| | | | AVYYCAREWQHGPVAYWGQGTLVTVSS |
| rHC3 | CDR-H1 | Residues 31-35 | NYGVS |
| VH | | of SEQ ID | |
| | | NO.: 41 | |
| rHC3 | CDR-H2 | Residues 50-65 | MIWADGSTHYASSLKG |
| VH | | of SEQ ID | |
| | | NO.: 41 | |
| rHC3 | CDR-H3 | Residues 98-106 | EWQHGPVAY |
| VH | | of SEQ ID | |
| | | NO.: 41 | |
| rHC19 | | SEQ ID NO.: 42 | EVQLVESGGGLVQPGGSLRLSCAASGFTFS |
| VH | | | NYGVTWVRQAPGKGLEWVSMIWADGSTHYA |
| | | | SSVKGRFTISRDNSKNTLYLQMNSLRAEDT |
| | | | AVYYCAREWQHGPAAYWGQGTLVTVSS |
| rHC19 | CDR-H1 | Residues 31-35 | NYGVT |
| VH | | of SEQ ID | |
| | | NO.: 42 | |
| rHC19 | CDR-H2 | Residues 50-65 | MIWADGSTHYASSVKG |
| VH | | of SEQ ID | |
| | | NO.: 42 | |
| rHC19 | CDR-H3 | Residues 98-106 | EWQHGPAAY |
| VH | | of SEQ ID | |
| | | NO.: 42 | |
| rHC34 | | SEQ ID NO.: 43 | EVQLVESGGGLVQPGGSLRLSCAASGFTFS |
| VH | | | NYGVTWVRQAPGKGLEWVSMIWADGSTHYA |
| | | | SSVKGRFTISRDNSKNTLYLQMNSLRAEDT |
| | | | AVYYCAREWQHGPSAYWGQGTLVTVSS |
| rHC34 | CDR-H1 | Residues 31-35 | NYGVT |
| VH | | of SEQ ID | |
| | | NO.: 43 | |
| rHC34 | CDR-H2 | Residues 50-65 | MIWADGSTHYASSVKG |
| VH | | of SEQ ID | |
| | | NO.: 43 | |
| rHC34 | CDR-H3 | Residues 98-106 | EWQHGPSAY |
| VH | | of SEQ ID | |
| | | NO.: 43 | |
| rHC83 | | SEQ ID NO.: 44 | EVQLVESGGGLVQPGGSLRLSCAASGFTFS |
| VH | | | NYGVTWVRQAPGKGLEWVSMIWADGSTHYA |
| | | | SSVKGRFTISRDNSKNTLYLQMNSLRAEDT |
| | | | AVYYCAREWQHGPVAYWGQGTLVTVSS |
| rHC83 | CDR-H1 | Residues 31-35 | NYGVT |
| VH | | of SEQ ID | |
| | | NO.: 44 | |
| rHC83 | CDR-H2 | Residues 50-65 | MIWADGSTHYASSVKG |
| VH | | of SEQ ID | |
| | | NO.: 44 | |
| rHC83 | CDR-H3 | Residues 98-106 | EWQHGPVAY |
| VH | | of SEQ ID | |
| | | NO.: 44 | |
| S4-19 | | SEQ ID NO.: 45 | EVQLVESGGGLVQPGGSLRLSCAASGFTFS |
| VH | | | NYGVEWVRQAPGKGLEWVSGIWADGSTHYA |
| | | | DTVKSRFTISRDNSKNTLYLQMNSLRAEDT |
| | | | AVYYCAREWQHGPVAYWGQGTLVTVSS |
| S4-19 | CDR-H1 | Residues 31-35 | NYGVE |
| VH | | of SEQ ID | |
| | | NO.: 45 | |
| S4-19 | CDR-H2 | Residues 50-65 | GIWADGSTHYADTVKS |
| VH | | of SEQ ID | |
| | | NO.: 45 | |
| S4-19 | CDR-H3 | Residues 98-106 | EWQHGPVAY |
| VH | | of SEQ ID | |
| | | NO.: 45 | |
| S4-50 | | SEQ ID NO.: 46 | EVQLVESGGGLVQPGGSLRLSCAASGFTFS |
| VH | | | NYGVEWVRQAPGKGLEWVSGIWADGSTHYA |
| | | | DTVKSRFTISRDNSKNTLYLQMNSLRAEDT |
| | | | AVYYCAREWQHGPVGYWGQGTLVTVSS |
| S4-50 | CDR-H1 | Residues 31-35 | NYGVE |
| VH | | of SEQ ID | |
| | | NO.: 46 | |
| S4-50 | CDR-H2 | Residues 50-65 | GIWADGSTHYADTVKS |
| VH | | of SEQ ID | |
| | | NO.: 46 | |
| S4-50 | CDR-H3 | Residues 98-106 | EWQHGPVGY |
| VH | | of SEQ ID | |
| | | NO.: 46 | |
| S4-63 | | SEQ ID NO.: 47 | EVQLVESGGGLVQPGGSLRLSCAASGFTFS |
| VH | | | NYGVEWVRQAPGKGLEWVSGIWADGSTHYA |
| | | | DTVKSRFTISRDNSKNTLYLQMNSLRAEDT |
| | | | AVYYCAREWQHGPVGYWGQGTLVTVSS |
| S4-63 | CDR-H1 | Residues 31-35 | NYGVE |
| VH | | of SEQ ID | |
| | | NO.: 47 | |
| S4-63 | CDR-H2 | Residues 50-65 | GIWADGSTHYADTVKS |
| VH | | of SEQ ID | |
| | | NO.: 47 | |
| S4-63 | CDR-H3 | Residues 98-106 | EWQHGPVGY |
| VH | | of SEQ ID | |
| | | NO.: 47 | |
| S4-55 | | SEQ ID NO.: 48 | EVQLVESGGGLVQPGGSLRLSCAASGFTFS |
| VH | | | NYGVTWVRQAPGKGLEWVSMIWADGSTDYA |
| | | | STVKGRFTISRDNSKNTLYLQMNSLRAEDT |
| | | | AVYYCAREWQHGPVGYWGQGTLVTVSS |
| S4-55 | CDR-H1 | Residues 31-35 | NYGVT |
| VH | | of SEQ ID | |
| | | NO.: 48 | |
| S4-55 | CDR-H2 | Residues 50-65 | MIWADGSTDYASTVKG |
| VH | | of SEQ ID | |
| | | NO.: 48 | |
| S4-55 | CDR-H3 | Residues 98-106 | EWQHGPVGY |
| VH | | of SEQ ID | |
| | | NO.: 48 | |
| S4-6 | | SEQ ID NO.: 49 | EVQLVESGGGLVQPGGSLRLSCAASGFTFS |
| VH | | | NYGVTWVRQAPGKGLEWVSMIWADGSTHYA |
| | | | SSVKGRFTISRDNSKNTLYLQMNSLRAEDT |
| | | | AVYYCAREWQHGPVAYWGQGTLVTVSS |
| S4-6 | CDR-H1 | Residues 31-35 | NYGVT |
| VH | | of SEQ ID | |
| | | NO.: 49 | |
| S4-6 | CDR-H2 | Residues 50-65 | MIWADGSTHYASSVKG |
| VH | | of SEQ ID | |
| | | NO.: 49 | |
| S4-6 | CDR-H3 | Residues 98-106 | EWQHGPVAY |
| VH | | of SEQ ID | |
| | | NO.: 49 | |
| S4-18 | | SEQ ID NO.: 50 | EVQLVESGGGLVQPGGSLRLSCAASGFTFS |
| VH | | | NYGVTWVRQAPGKGLEWVSMIWADGSTHYA |
| | | | DSVKSRFTISRDNSKNTLYLQMNSLRAEDT |
| | | | AVYYCAREWQHGPLAYWGQGTLVTVSS |
| S4-18 | CDR-H1 | Residues 31-35 | NYGVT |
| VH | | of SEQ ID | |
| | | NO.: 50 | |
| S4-18 | CDR-H2 | Residues 50-65 | MIWADGSTHYADSVKS |
| VH | | of SEQ ID | |
| | | NO.: 50 | |
| S4-18 | CDR-H3 | Residues 98-106 | EWQHGPLAY |
| VH | | of SEQ ID | |
| | | NO.: 50 | |
| S4-31 | | SEQ ID NO.:51 | EVQLVESGGGLVQPGGSLRLSCAASGFTFS |
| VH | | | NYGVQWVRQAPGKGLEWVSGIGADGSTAYA |
| | | | SSLKGRFTISRDNSKNTLYLQMNSLRAEDT |
| | | | AVYYCAREWQHSGLAYWGQGTLVTVSS |
| S4-31 | CDR-H1 | Residues 31-35 | NYGVQ |
| VH | | of SEQ ID | |
| | | NO.: 51 | |
| S4-31 | CDR-H2 | Residues 50-65 | GIGADGSTAYASSLKG |
| VH | | of SEQ ID | |
| | | NO.: 51 | |
| S4-31 | CDR-H3 | Residues 98-106 | EWQHSGLAY |
| VH | | of SEQ ID | |
| | | NO.: 51 | |
| S4-34 | | SEQ ID NO.: 52 | EVQLVESGGGLVQPGGSLRLSCAASGFTFS |
| VH | | | NYGVSWVRQAPGKGLEWVSMIWADGSTHYA |
| | | | DTVKGRFTISRDNSKNTLYLQMNSLRAEDT |
| | | | AVYYCAREWQHGPLAYWGQGTLVTVSS |
| S4-34 | CDR-H1 | Residues 31-35 | NYGVS |
| VH | | of SEQ ID | |
| | | NO.: 52 | |
| S4-34 | CDR-H2 | Residues 50-65 | MIWADGSTHYADTVKG |
| VH | | of SEQ ID | |
| | | NO.: 52 | |
| S4-34 | CDR-H3 | Residues 98-106 | EWQHGPLAY |
| VH | | of SEQ ID | |
| | | NO.: 52 | |
| S4-74 | | SEQ ID NO.: 53 | EVQLVESGGGLVQPGGSLRLSCAASGFTFS |
| VH | | | NYGVTWVRQAPGKGLEWVSMIWADGSTHYA |
| | | | DTVKGRFTISRDNSKNTLYLQMNSLRAEDT |
| | | | AVYYCAREWQHGPLAYWGQGTLVTVSS |
| S4-74 | CDR-H1 | Residues 31-35 | NYGVT |
| VH | | of SEQ ID | |
| | | NO.: 53 | |
| S4-74 | CDR-H2 | Residues 50-65 | MIWADGSTHYADTVKG |
| VH | | of SEQ ID | |
| | | NO.: 53 | |
| S4-74 | CDR-H3 | Residues 98-106 | EWQHGPLAY |
| VH | | of SEQ ID | |
| | | NO.: 53 | |
| S4-12 | | SEQ ID NO.: 54 | EVQLVESGGGLVQPGGSLRLSCAASGFTFS |
| VH | | | NYGVTWVRQAPGKGLEWVSMIWADGSTHYA |
| | | | SSVKGRFTISRDNSKNTLYLQMNSLRAEDT |
| | | | AVYYCAREWQHGPVAYWGQGTLVTVSS |
| S4-12 | CDR-H1 | Residues 31-35 | NYGVT |
| VH | | of SEQ ID | |
| | | NO.: 54 | |
| S4-12 | CDR-H2 | Residues 50-65 | MIWADGSTHYASSVKG |
| VH | | of SEQ ID | |
| | | NO.: 54 | |
| S4-12 | CDR-H3 | Residues 98-106 | EWQHGPVAY |
| VH | | of SEQ ID | |
| | | NO.: 54 | |
| S4-54 | | SEQ ID NO.: 55 | EVQLVESGGGLVQPGGSLRLSCAASGFTFS |
| VH | | | NYGVTWVRQAPGKGLEWVSMIWADGSTHYA |
| | | | SSVKGRFTISRDNSKNTLYLQMNSLRAEDT |
| | | | AVYYCAREWQHGPVAYWGQGTLVTVSS |
| S4-54 | CDR-H1 | Residues 31-35 | NYGVT |
| VH | | of SEQ ID | |
| | | NO.: 55 | |
| S4-54 | CDR-H2 | Residues 50-65 | MIWADGSTHYASSVKG |
| VH | | of SEQ ID | |
| | | NO.: 55 | |
| S4-54 | CDR-H3 | Residues 98-106 | EWQHGPVAY |
| VH | | of SEQ ID | |
| | | NO.: 55 | |
| S4-17 | | SEQ ID NO.: 56 | EVQLVESGGGLVQPGGSLRLSCAASGFTFS |
| VH | | | NYGVTWVRQAPGKGLEWVSMIWADGSTHYA |
| | | | SSVKGRFTISRDNSKNTLYLQMNSLRAEDT |
| | | | AVYYCAREWQHGPVAYWGQGTLVTVSS |
| S4-17 | CDR-H1 | Residues 31-35 | NYGVT |
| VH | | of SEQ ID | |
| | | NO.: 56 | |
| S4-17 | CDR-H2 | Residues 50-65 | MIWADGSTHYASSVKG |
| VH | | of SEQ ID | |
| | | NO.: 56 | |
| S4-17 | CDR-H3 | Residues 98-106 | EWQHGPVAY |
| VH | | of SEQ ID | |
| | | NO.: 56 | |
| S4-40 | | SEQ ID NO.: 57 | EVQLVESGGGLVQPGGSLRLSCAASGFTFS |
| VH | | | NYGVTWVRQAPGKGLEWVSMIWADGSTHYA |
| | | | SSVKGRFTISRDNSKNTLYLQMNSLRAEDT |
| | | | AVYYCAREWQHGPVAYWGQGTLVTVSS |
| S4-40 | CDR-H1 | Residues 31-35 | NYGVT |
| VH | | of SEQ ID | |
| | | NO.: 57 | |
| S4-40 | CDR-H2 | Residues 50-65 | MIWADGSTHYASSVKG |
| VH | | of SEQ ID | |
| | | NO.: 57 | |
| S4-40 | CDR-H3 | Residues 98-106 | EWQHGPVAY |
| VH | | of SEQ ID | |
| | | NO.: 57 | |
| S4-24 | | SEQ ID NO.: 58 | EVQLVESGGGLVQPGGSLRLSCAASGFTFS |
| VH | | | NYGVTWVRQAPGKGLEWVSMIWADGSTHYA |
| | | | SSVKGRFTISRDNSKNTLYLQMNSLRAEDT |
| | | | AVYYCAREWQHGPVAYWGQGTLVTVSS |
| S4-24 | CDR-H1 | Residues 31-35 | NYGVT |
| VH | | of SEQ ID | |
| | | NO.: 58 | |
| S4-24 | CDR-H2 | Residues 50-65 | MIWADGSTHYASSVKG |
| VH | | of SEQ ID | |
| | | NO.: 58 | |
| S4-24 | CDR-H3 | Residues 98-106 | EWQHGPVAY |
| VH | | of SEQ ID | |
| | | NO.: 58 | |

[0056] Table 7 provides VL sequences of IgG converted clones for Humanized anti-TNF MAK-195 antibodies as discussed in detail in Example 2.

TABLE 7
Humanized anti-TNF MAK-195 Ab VL sequences of
IgG converted clones

| | | | Sequence |
|---|---|---|---|
| Protein region | | | 123456789012345678901234567890 |
| hMAK195 | | SEQ ID NO.: 59 | DIQMTQSPSSLSASVGDRVTITCKASQAVS |
| VL.1 | | | SAVAWYQQKPGKAPKLLIYWASTRHTGVPS |
| VL | | | RFSGSGSGTDFTLTISSLQPEDFATYYCQQ |
| | | | HYSTPFTFGQGTKLEIKR |
| hMAK195 | CDR-L1 | Residues 24-34 | KASQAVSSAVA |
| VL.1 | | of SEQ ID | |
| VL | | NO.: 59 | |
| hMAK195 | CDR-L2 | Residues 50-56 | WASTRHT |
| VL.1 | | of SEQ ID | |
| VL | | NO.: 59 | |
| hMAK195 | CDR-L3 | Residues 89-97 | QQHYSTPFT |
| VL.1 | | of SEQ ID | |
| VL | | NO.: 59 | |
| S4-24 | | SEQ ID NO.: 60 | DIQMTQSPSSLSASVGDRVTITCRASQLVS |
| VL | | | SAVAWYQQKPGKAPKLLIYWASTLHTGVPS |
| | | | RFSGSGSGTDFTLTISSLQPEDFATYYCQQ |
| | | | HYRTPFTFGQGTKLEIKR |
| S4-24 | CDR-L1 | Residues 24-34 | RASQLVSSAVA |
| VL | | of SEQ ID | |
| | | NO.: 60 | |
| S4-24 | CDR-L2 | Residues 50-56 | WASTLHT |
| VL | | of SEQ ID | |
| | | NO.: 60 | |
| S4-24 | CDR-L3 | Residues 89-97 | QQHYRTPFT |
| VL | | of SEQ ID | |
| | | NO.: 60 | |
| S4-40 | | SEQ ID NO.: 61 | DIQMTQSPSSLSASVGDRVTITCRASQLVS |
| VL | | | SAVAWYQQKPGKAPKLLIYWASTRHSGVPS |
| | | | RFSGSGSGTDFTLTISSLQPEDFATYYCQQ |
| | | | HYRTPFSFGQGTKLEIKR |
| S4-40 | CDR-L1 | Residues 24-34 | RASQLVSSAVA |
| VL | | of SEQ ID | |
| | | NO.: 61 | |
| S4-40 | CDR-L2 | Residues 50-56 | WASTRHS |
| VL | | of SEQ ID | |
| | | NO.: 61 | |
| S4-40 | CDR-L3 | Residues 89-97 | QQHYRTPFS |
| VL | | of SEQ ID | |
| | | NO.: 61 | |
| S4-17 | | SEQ ID NO.: 62 | DIQMTQSPSSLSASVGDRVTITCRASQLVS |
| VL | | | SAVAWYQQKPGKAPKLLIYWASTRHSGVPS |
| | | | RFSGSGSGTDFTLTISSLQPEDFATYYCQQ |
| | | | HYRTPFTFGQGTKLEIKR |
| S4-17 | CDR-L1 | Residues 24-34 | RASQLVSSAVA |
| VL | | of SEQ ID | |
| | | NO.: 62 | |
| S4-17 | CDR-L2 | Residues 50-56 | WASTRHS |
| VL | | of SEQ ID | |
| | | NO.: 62 | |
| S4-17 | CDR-L3 | Residues 89-97 | QQHYRTPFT |
| VL | | of SEQ ID | |
| | | NO.: 62 | |
| S4-54 | | SEQ ID NO.: 63 | DIQMTQSPSSLSASVGDRVTITCRASQLVS |
| VL | | | SAVAWYQQKPGKAPKLLIYWASARHTGVPS |
| | | | RFSGSGSGTDFTLTISSLQPEDFATYYCQQ |
| | | | HYKTPFSFGQGTKLEIKR |
| S4-54 | CDR-L1 | Residues 24-34 | RASQLVSSAVA |
| VL | | of SEQ ID | |
| | | NO.: 63 | |
| S4-54 | CDR-L2 | Residues 50-56 | WASARHT |
| VL | | of SEQ ID | |
| | | NO.: 63 | |
| S4-54 | CDR-L3 | Residues 89-97 | QQHYKTPFS |
| VL | | of SEQ ID | |
| | | NO.: 63 | |
| S4-12 | | SEQ ID NO.: 64 | DIQMTQSPSSLSASVGDRVTITCRASQLVS |
| VL | | | SAVAWYQQKPGKAPKLLIYWASARHTGVPS |
| | | | RFSGSGSGTDFTLTISSLQPEDFATYYCQQ |
| | | | HYKTPFTFGQGTKLEIKR |
| S4-12 | CDR-L1 | Residues 24-34 | RASQLVSSAVA |
| VL | | of SEQ ID | |
| | | NO.: 64 | |
| S4-12 | CDR-L2 | Residues 50-56 | WASARHT |
| VL | | of SEQ ID | |
| | | NO.: 64 | |
| S4-12 | CDR-L3 | Residues 89-97 | QQHYKTPFT |
| VL | | of SEQ ID | |
| | | NO.: 64 | |
| S4-74 | | SEQ ID NO.: 65 | DIQMTQSPSSLSASVGDRVTITCRASQLVS |
| VL | | | SAVAWYQQKPGKAPKLLIYWASARHTGVPS |
| | | | RFSGSGSGTDFTLTISSLQPEDFATYYCQQ |
| | | | HYRTPFTFGQGTKLEIKR |
| S4-74 | CDR-L1 | Residues 24-34 | RASQLVSSAVA |
| VL | | of SEQ ID | |
| | | NO.: 65 | |
| S4-74 | CDR-L2 | Residues 50-56 | WASARHT |
| VL | | of SEQ ID | |
| | | NO.: 65 | |
| S4-74 | CDR-L3 | Residues 89-97 | QQHYRTPFT |
| VL | | of SEQ ID | |
| | | NO.: 65 | |
| S4-34 | | SEQ ID NO.: 66 | DIQMTQSPSSLSASVGDRVTITCRASQLVS |
| VL | | | SAVAWYQQKPGKAPKLLIYWASTRHTGVPS |
| | | | RFSGSGSGTDFTLTISSLQPEDFATYYCQQ |
| | | | HYRTPFTFGQGTKLEIKR |
| S4-34 | CDR-L1 | Residues 24-34 | RASQLVSSAVA |
| VL | | of SEQ ID | |
| | | NO.: 66 | |
| S4-34 | CDR-L2 | Residues 50-56 | WASTRHT |
| VL | | of SEQ ID | |
| | | NO.: 66 | |
| S4-34 | CDR-L3 | Residues 89-97 | QQHYRTPFT |
| VL | | of SEQ ID | |
| | | NO.: 66 | |
| S4-31 | | SEQ ID NO.: 67 | DIQMTQSPSSLSASVGDRVTITCRASQGVS |
| VL | | | SALAWYQQKPGKAPKLLIYWASALHSGVPS |
| | | | RFSGSGSGTDFTLTISSLQPEDFATYYCQQ |
| | | | HYSAPFTFGQGTKLEIKR |
| S4-31 | CDR-L1 | Residues 24-34 | RASQGVSSALA |
| VL | | of SEQ ID | |
| | | NO.: 67 | |
| S4-31 | CDR-L2 | Residues 50-56 | WASALHS |
| VL | | of SEQ ID | |
| | | NO.: 67 | |
| S4-31 | CDR-L3 | Residues 89-97 | QQHYSAPFT |
| VL | | of SEQ ID | |
| | | NO.: 67 | |
| S4-18 | | SEQ ID NO.: 68 | DIQMTQSPSSLSASVGDRVTITCRASQLVS |
| VL | | | SAVAWYQQKPGKAPKLLIYWASTLHSGVPS |
| | | | RFSGSGSGTDFTLTISSLQPEDFATYYCQQ |
| | | | HYSTPFTFGQGTKLEIKR |
| S4-18 | CDR-L1 | Residues 24-34 | RASQLVSSAVA |
| VL | | of SEQ ID | |
| | | NO.: 68 | |
| S4-18 | CDR-L2 | Residues 50-56 | WASTLHS |
| VL | | of SEQ ID | |
| | | NO.: 68 | |
| S4-18 | CDR-L3 | Residues 89-97 | QQHYSTPFT |
| VL | | of SEQ ID | |
| | | NO.: 68 | |
| S4-6 | | SEQ ID NO.: 69 | DIQMTQSPSSLSASVGDRVTITCKASQLVS |
| VL | | | SAVAWYQQKPGKAPKLLIYWASTRHTGVPS |
| | | | RFSGSGSGTDFTLTISSLQPEDFATYYCQQ |
| | | | HYSTPFTFGQGTKLEIKR |
| S4-6 | CDR-L1 | Residues 24-34 | KASQLVSSAVA |
| VL | | of SEQ ID | |
| | | NO.: 69 | |
| S4-6 | CDR-L2 | Residues 50-56 | WASTRHT |
| VL | | of SEQ ID | |
| | | NO.: 69 | |
| S4-6 | CDR-L3 | Residues 89-97 | QQHYSTPFT |
| VL | | of SEQ ID | |
| | | NO.: 69 | |
| S4-55 | | SEQ ID NO.: 70 | DIQMTQSPSSLSASVGDRVTITCKASQLVS |
| VL | | | SAVAWYQQKPGKAPKLLIYWASTLHTGVPS |
| | | | RFSGSGSGTDFTLTISSLQPEDFATYYCQQ |
| | | | HYRTPFTFGQGTKLEIKR |
| S4-55 | CDR-L1 | Residues 24-34 | KASQLVSSAVA |
| VL | | of SEQ ID | |
| | | NO.: 70 | |
| S4-55 | CDR-L2 | Residues 50-56 | WASTLHT |
| VL | | of SEQ ID | |
| | | NO.: 70 | |
| S4-55 | CDR-L3 | Residues 89-97 | QQHYRTPFT |
| VL | | of SEQ ID | |
| | | NO.: 70 | |
| S4-63 | | SEQ ID NO.: 71 | DIQMTQSPSSLSASVGDRVTITCKASQKVS |
| VL | | | SALAWYQQKPGKAPKLLIYWASALHSGVPS |
| | | | RFSGSGSGTDFTLTISSLQPEDFATYYCQQ |
| | | | HYRPPFTFGQGTKLEIKR |
| S4-63 | CDR-L1 | Residues 24-34 | KASQKVSSALA |
| VL | | of SEQ ID | |
| | | NO.: 71 | |
| S4-63 | CDR-L2 | Residues 50-56 | WASALHS |
| VL | | of SEQ ID | |
| | | NO.: 71 | |
| S4-63 | CDR-L3 | Residues 89-97 | QQHYRPPFT |
| VL | | of SEQ ID | |
| | | NO.: 71 | |
| S4-50 | | SEQ ID NO.: 72 | DIQMTQSPSSLSASVGDRVTITCKASQLVS |
| VL | | | SAVAWYQQKPGKAPKLLIYWASALHTGVPS |
| | | | RFSGSGSGTDFTLTISSLQPEDFATYYCQQ |
| | | | HYSSPYTFGQGTKLEIKR |
| S4-50 | CDR-L1 | Residues 24-34 | KASQLVSSAVA |
| VL | | of SEQ ID | |
| | | NO.: 72 | |
| S4-50 | CDR-L2 | Residues 50-56 | WASALHT |
| VL | | of SEQ ID | |
| | | NO.: 72 | |
| S4-50 | CDR-L3 | Residues 89-97 | QQHYSSPYT |
| VL | | of SEQ ID | |
| | | NO.: 72 | |
| S4-19 | | SEQ ID NO.: 73 | DIQMTQSPSSLSASVGDRVTITCKASQLVS |
| VL | | | SAVAWYQQKPGKAPKLLIYWASTLHTGVPS |
| | | | RFSGSGSGTDFTLTISSLQPEDFATYYCQQ |
| | | | HYRTPFTFGQGTKLEIKR |
| S4-19 | CDR-L1 | Residues 24-34 | KASQLVSSAVA |
| VL | | of SEQ ID | |
| | | NO.: 73 | |
| S4-19 | CDR-L2 | Residues 50-56 | WASTLHT |
| VL | | of SEQ ID | |
| | | NO.: 73 | |
| S4-19 | CDR-L3 | Residues 89-97 | QQHYRTPFT |
| VL | | of SEQ ID | |
| | | NO.: 73 | |

[0057] C. Individual hMAK-199 Sequences from Converted Clones

[0058] Table 8 provides VH sequences of humanized anti-TNF MAK-199 converted clones as discussed in detail in Example 3.

TABLE 8
Humanized Anti-TNF MAK-199 Ab VH sequences of
IgG converted clones

| | | | Sequence |
|---|---|---|---|
| Protein region | | | 123456789012345678901234567890 |
| J662M2S3 | | SEQ ID NO.: 74 | EVQLVQSGAEVKKPGASVKVSCKASGYTFA |
| #10 VH | | | NYGIIWVRQAPGQGLEWMGWINTYTGKPTY |
| | | | AQKFQGRVTMTTDTSTSTAYMELSSLRSED |
| | | | TAVYYCARKLFTTMDVTDNAMDYWGQGTTV |
| | | | TVSS |
| J662M2S3# | CDR-H1 | Residues 31-35 | NYGII |
| 10 VH | | of SEQ ID | |
| | | NO.: 74 | |
| J662M2S3# | CDR-H2 | Residues 50-66 | WINTYTGKPTYAQKFQG |
| 10 VH | | of SEQ ID | |
| | | NO.: 74 | |
| J662M2S3# | CDR-H3 | Residues 99-112 | RASQDISQYLN |
| 10 VH | | of SEQ ID | |
| | | NO.: 74 | |
| J662M2S3# | | SEQ ID NO.: 75 | EVQLVQSGAEVKKPGASVKVSCKASGYTFN |
| 13 VH | | | NYGIIWVRQAPGQGLEWMGWINTYTGKPTY |
| | | | AQKLQGRVTMTTDTSTSTAYMELSSLRSED |
| | | | TAVYFCARKLFNTVDVTDNAMDYWGQGTTV |
| | | | TVSS |
| J662M2S3# | CDR-H1 | Residues 31-35 | NYGII |
| 13 VH | | of SEQ ID | |
| | | NO.: 75 | |
| J662M2S3# | CDR-H2 | Residues 50-66 | WINTYTGKPTYAQKLQG |
| 13 VH | | of SEQ ID | |
| | | NO.: 75 | |
| J662M2S3# | CDR-H3 | Residues 99-112 | KLFNTVDVTDNAMD |
| 13 VH | | of SEQ ID | |
| | | NO.: 75 | |
| J662M2S3# | | SEQ ID NO.: 76 | EVQLVQSGAEVKKPGASVKVSCKASGYTFN |
| 15 VH | | | NYGIIWVRQAPGQGLEWMGWINTYTGVPTY |
| | | | AQKFQGRVTMTTDTSTSTAYMELSSLRSED |
| | | | TAVYYCARKLFNTVDVTDNAMDYWGQGTTV |
| | | | TVSS |
| J662M2S3# | CDR-H1 | Residues 31-35 | NYGII |
| 15 VH | | of SEQ ID | |
| | | NO.: 76 | |
| J662M2S3# | CDR-H2 | Residues 50-66 | WINTYTGVPTYAQKFQG |
| 15 VH | | of SEQ ID | |
| | | NO.: 76 | |
| J662M2S3# | CDR-H3 | Residues 99-112 | KLFNTVDVTDNAMD |
| 15 VH | | of SEQ ID | |
| | | NO.: 76 | |
| J662M2S3# | | SEQ ID NO.: 77 | EVQLVQSGAEVKKPGASVKVSCKASGYTFN |
| 16 VH | | | NYGIIWVRQAPGQGLEWMGWINTYTGKPTY |
| | | | AQKFQGRVTMTTDTSTSTAYMELSSLRSED |
| | | | TAVYYCARKLFNTVAVTDNAMDYWGQGTTV |
| | | | TVSS |
| J662M2S3# | CDR-H1 | Residues 31-35 | NYGII |
| 16 VH | | of SEQ ID | |
| | | NO.: 77 | |
| J662M2S3# | CDR-H2 | Residues 50-66 | WINTYTGKPTYAQKFQG |
| 16 VH | | of SEQ ID | |
| | | NO.: 77 | |
| J662M2S3# | CDR-H3 | Residues 99-112 | KLFNTVAVTDNAMD |
| 16 VH | | of SEQ ID | |
| | | NO.: 77 | |
| J662M2S3# | | SEQ ID NO.: 78 | EVQLVQSGAEVKKPGASVKVSCKASGYTFR |
| 21 VH | | | NYGIIWVRQAPGQGLEWMGWINTYTGKPTY |
| | | | AQKFQGRVTMTTDTSTSTAYMELSSLRSED |
| | | | TAVYFCARKLFTTVDVTDNAMDYWGQGTTV |
| | | | TVSS |
| J662M2S3# | CDR-H1 | Residues 31-35 | NYGII |
| 21 VH | | of SEQ ID | |
| | | NO.: 78 | |
| J662M2S3# | CDR-H2 | Residues 50-66 | WINTYTGKPTYAQKFQG |
| 21 VH | | of SEQ ID | |
| | | NO.: 78 | |
| J662M2S3# | CDR-H3 | Residues 99-112 | KLFTTVDVTDNAMD |
| 21 VH | | of SEQ ID | |
| | | NO.: 78 | |
| J662M2S3# | | SEQ ID NO.: 79 | EVQLVQSGAEVKKPGASVKVSCKASGYTFN |
| 34 VH | | | NYGINWVRQAPGQGLEWMGWINTYTGKPTY |
| | | | AQKFQGRVTMTTDTSTSTAYMELSSLRSED |
| | | | TAVYFCARKFRNTVAVTDYAMDYWGQGTTV |
| | | | TVSS |
| J662M2S3# | CDR-H1 | Residues 31-35 | NYGIN |
| 34 VH | | of SEQ ID | |
| | | NO.: 79 | |
| J662M2S3# | CDR-H2 | Residues 50-66 | WINTYTGKPTYAQKFQG |
| 34 VH | | of SEQ ID | |
| | | NO.: 79 | |
| J662M2S3# | CDR-H3 | Residues 99-112 | KFRNTVAVTDYAMD |
| 34 VH | | of SEQ ID | |
| | | NO.: 79 | |
| J662M2S3# | | SEQ ID NO.: 80 | EVQLVQSGAEVKKPGASVKVSCKASGYTFR |
| 36 VH | | | NYGITWVRQAPGQGLEWMGWINTYTGKPTY |
| | | | AQKFQGRVTMTTDTSTSTAYMELSSLRSED |
| | | | TAVYFCARKLFTTMDVTDNAMDYWGQGTTV |
| | | | TVSS |
| J662M2S3# | CDR-H1 | Residues 31-35 | NYGIT |
| 36 VH | | of SEQ ID | |
| | | NO.: 80 | |
| J662M2S3# | CDR-H2 | Residues 50-66 | WINTYTGKPTYAQKFQG |
| 36 VH | | of SEQ ID | |
| | | NO.: 80 | |
| J662M2S3# | CDR-H3 | Residues 99-112 | KLFTTMDVTDNAMD |
| 36 VH | | of SEQ ID | |
| | | NO.: 80 | |
| J662M2S3# | | SEQ ID NO.: 81 | EVQLVQSGAEVKKPGASVKVSCKASGYTFA |
| 45 VH | | | NYGIIWVRQAPGQGLEWMGWINTYTGKPTY |
| | | | AQKFQGRVTMTTDTSTSTAYMELSSLRSED |
| | | | TAVYYCARKLFTTMDVTDNAMDYWGQGTTV |
| | | | TVSS |
| J662M2S3# | CDR-H1 | Residues 31-35 | NYGII |
| 45 VH | | of SEQ ID | |
| | | NO.: 81 | |
| J662M2S3# | CDR-H2 | Residues 50-66 | WINTYTGKPTYAQKFQG |
| 45 VH | | of SEQ ID | |
| | | NO.: 81 | |
| J662M2S3# | CDR-H3 | Residues 99-112 | KLFTTMDVTDNAMD |
| 45 VH | | of SEQ ID | |
| | | NO.: 81 | |
| J662M2S3# | | SEQ ID NO.: 82 | EVQLVQSGAEVKKPGASVKVSCKASGYTFS |
| 58 VH | | | NYGINWVRQAPGQGLEWMGWINTYTGQPSY |
| | | | AQKFQGRVTMTTDTSTSTAYMELSSLRSED |
| | | | TAVYYCARKLFKTEAVTDYAMDYWGQGTTV |
| | | | TVSS |
| J662M2S3# | CDR-H1 | Residues 31-35 | NYGIN |
| 58 VH | | of SEQ ID | |
| | | NO.: 82 | |
| J662M2S3# | CDR-H2 | Residues 50-66 | WINTYTGQPSYAQKFQG |
| 58 VH | | of SEQ ID | |
| | | NO.: 82 | |
| J662M2S3# | CDR-H3 | Residues 99-112 | KLFKTEAVTDYAMD |
| 58 VH | | of SEQ ID | |
| | | NO.: 82 | |
| J662M2S3# | | SEQ ID NO.: 83 | EVQLVQSGAEVKKPGASVKVSCKASGYTFN |
| 72 VH | | | NYGIIWVRQAPGQGLEWMGWINTYSGKPTY |
| | | | AQKFQGRVTMTTDTSTSTAYMELSSLRSED |
| | | | TAVYFCARKLFTTMDVTDNAMDYWGQGTTV |
| | | | TVSS |
| J662M2S3# | CDR-H1 | Residues 31-35 | NYGII |
| 72 VH | | of SEQ ID | |
| | | NO.: 83 | |
| J662M2S3# | CDR-H2 | Residues 50-66 | WINTYSGKPTYAQKFQG |
| 72 VH | | of SEQ ID | |
| | | NO.: 83 | |
| J662M2S3# | CDR-H3 | Residues 99-112 | KLFTTMDVTDNAMD |
| 72 VH | | of SEQ ID | |
| | | NO.: 83 | |

[0059] Table 9 provides VL sequences of humanized anti-TNF MAK-199 converted clones as discussed in detail in Example 3.

TABLE 9
Humanized Anti-TNF MAK-199 Ab VL sequences of
IgG converted clones

| | | | Sequence |
|---|---|---|---|
| Protein region | | | 123456789012345678901234567890 |
| J662M2S3# | | SEQ ID | DIQMTQSPSSLSASVGDRVTITCRASQDIS |
| 10 VL | | NO.: 84 | QYLNWYQQKPGKAPKLLIYYTSRLQSGVPS |
| | | | RFSGSGSGTDFTLTISSLQPEDFATYFCQQ |
| | | | GNTWPPTFGQGTKLEIK |
| J662M2S3#10 | CDR-L1 | Residues 24-34 | RASQDISQYLN |
| VL | | of SEQ ID | |
| | | NO.: 84 | |
| J662M2S3#10 | CDR-L2 | Residues 50-56 | YTSRLQS |
| VL | | of SEQ ID | |
| | | NO.: 84 | |
| J662M2S3#10 | CDR-L3 | Residues 89-97 | QQGNTWPPT |
| VL | | of SEQ | |
| | | ID NO.: 84 | |
| J662M2S3#13 | | SEQ ID | DIQMTQSPSSLSASVGDRVTITCRASQDIS |
| VL | | NO.: 85 | NYLNWYQQKPGKAPKLLIYYTSRLQSGVPS |
| | | | RFSGSGSGTDYTLTISSLQPEDFATYFCQQ |
| | | | GNSWPPTFGQGTKLEIK |
| J662M2S3#13 | CDR-L1 | Residues 24-34 | RASQDISNYLN |
| VL | | of SEQ ID | |
| | | NO.: 85 | |
| J662M2S3#13 | CDR-L2 | Residues 50-56 | YTSRLQS |
| VL | | of SEQ ID | |
| | | NO.: 85 | |
| J662M2S3#13 | CDR-L3 | Residues 89-97 | QQGNSWPPT |
| VL | | of SEQ | |
| | | ID NO.: 85 | |
| J662M2S3#15 | | SEQ ID | DIQMTQSPSSLSASVGDRVTITCRASQDIY |
| VL | | NO.: 86 | NYLNWYQQKPGKAPKLLIYYTSRLQSGVPS |
| | | | RFSGSGSGTDYTLTISSLQPEDFATYFCQQ |
| | | | GNTQPPTFGQGTKLEIK |
| J662M2S3#15 | CDR-L1 | Residues 24-34 | RASQDIYNYLN |
| VL | | of SEQ ID | |
| | | NO.: 86 | |
| J662M2S3#15 | CDR-L2 | Residues 50-56 | YTSRLQS |
| VL | | of SEQ ID | |
| | | NO.: 86 | |
| J662M2S3#15 | CDR-L3 | Residues 89-97 | QQGNTQPPT |
| VL | | of SEQ | |
| | | ID NO.: 86 | |
| J662M2S3#16 | | SEQ ID | DIQMTQSPSSLSASVGDRVTITCRASQDIE |
| VL | | NO.: 87 | NYLNWYQQKPGKAPKLLIYYTSRLQSGVPS |
| | | | RFSGSGSGTDFTLTISSLQPEDFATYFCQQ |
| | | | GNTQPPTFGQGTKLEIK |
| J662M2S3#16 | CDR-L1 | Residues 24-34 | RASQDIENYLN |
| VL | | of SEQ ID | |
| | | NO.: 87 | |
| J662M2S3#16 | CDR-L2 | Residues 50-56 | YTSRLQS |
| VL | | of SEQ ID | |
| | | NO.: 87 | |
| J662M2S3#16 | CDR-L3 | Residues 89-97 | QQGNTQPPT |
| VL | | of SEQ | |
| | | ID NO.: 87 | |
| J662M2S3#21 | | SEQ ID | DIQMTQSPSSLSASVGDRVTITCRASQDIS |
| VL | | NO.: 88 | NYLNWYQQKPGKAPKLLIYYTSRLQSGVPS |
| | | | RFSGSGSGTDYTLTISSLQPEDFATYFCQQ |
| | | | GNTWPPTFGQGTKLEIK |
| J662M2S3#21 | CDR-L1 | Residues 24-34 | RASQDISNYLN |
| VL | | of SEQ ID | |
| | | NO.: 88 | |
| J662M2S3#21 | CDR-L2 | Residues 50-56 | YTSRLQS |
| VL | | of SEQ ID | |
| | | NO.: 88 | |
| J662M2S3#21 | CDR-L3 | Residues 89-97 | QQGNTWPPT |
| VL | | of SEQ | |
| | | ID NO.: 88 | |
| J662M2S3#34 | | SEQ ID | DIQMTQSPSSLSASVGDRVTITCRASQDIY |
| VL | | NO.: 89 | DVLNWYQQKPGKAPKLLIYYASRLQSGVPS |
| | | | RFSGSGSGTDFTLTISSLQPEDFATYYCQQ |
| | | | GITLPPTFGQGTKLEIK |
| J662M2S3#34 | CDR-L1 | Residues 24-34 | RASQDIYDVLN |
| VL | | of SEQ ID | |
| | | NO.: 89 | |
| J662M2S3#34 | CDR-L2 | Residues 50-56 | YASRLQS |
| VL | | of SEQ ID | |
| | | NO.: 89 | |
| J662M2S3#34 | CDR-L3 | Residues 89-97 | QQGITLPPT |
| VL | | of SEQ | |
| | | ID NO.: 89 | |
| J662M2S3#36 | | SEQ ID | DIQMTQSPSSLSASVGDRVTITCRASQDIS |
| VL | | NO.: 90 | NYLNWYQQKPGKAPKLLIYYTSRLQSGVPS |
| | | | RFSGSGSGTDYTLTISSLQPEDFATYFCQQ |
| | | | GNTWPPTFGQGTKLEIK |
| J662M2S3#36 | CDR-L1 | Residues 24-34 | RASQDISNYLN |
| VL | | of SEQ ID | |
| | | NO.: 90 | |
| J662M2S3#36 | CDR-L2 | Residues 50-56 | YTSRLQS |
| VL | | of SEQ ID | |
| | | NO.: 90 | |
| J662M2S3#36 | CDR-L3 | Residues 89-97 | QQGNTWPPT |
| VL | | of SEQ | |
| | | ID NO.: 90 | |
| J662M2S3#45 | | SEQ ID | DIQMTQSPSSLSASVGDRVTITCRASQDIS |
| VL | | NO.: 91 | QYLNWYQQKPGKAPKLLIYYTSRLQSGVPS |
| | | | RFSGSGSGTDFTLTISSLQPEDFATYFCQQ |
| | | | GNTWPPTFGQGTKLEIK |
| J662M2S3#45 | CDR-L1 | Residues 24-34 | RASQDISQYLN |
| VL | | of SEQ ID | |
| | | NO.: 91 | |
| J662M2S3#45 | CDR-L2 | Residues 50-56 | YTSRLQS |
| VL | | of SEQ ID | |
| | | NO.: 91 | |
| J662M2S3#45 | CDR-L3 | Residues 89-97 | QQGNTWPPT |
| VL | | of SEQ | |
| | | ID NO.: 91 | |
| J662M2S3#58 | | SEQ ID | DIQMTQSPSSLSASVGDRVTITCRASQNIY |
| VL | | NO.: 92 | NVLNWYQQKPGKAPKLLIYYASRLQSGVPS |
| | | | RFSGSGSGTDFTLTISSLQPEDFATYFCQQ |
| | | | GNTMPPTFGQGTKLEIK |
| J662M2S3#58 | CDR-L1 | Residues 24-34 | RASQNIYNVLN |
| VL | | of SEQ ID | |
| | | NO.: 92 | |
| J662M2S3#58 | CDR-L2 | Residues 50-56 | YASRLQS |
| VL | | of SEQ ID | |
| | | NO.: 92 | |
| J662M2S3#58 | CDR-L3 | Residues 89-97 | QQGNTMPPT |
| VL | | of SEQ | |
| | | ID NO.: 92 | |
| J662M2S3#72 | | SEQ ID | DIQMTQSPSSLSASVGDRVTITCRASQDIS |
| VL | | NO.: 93 | NFLNWYQQKPGKAPKLLIYYTSRLQSGVPS |
| | | | RFSGSGSGTDYTLTISSLQPEDFATYFCQQ |
| | | | GNTQPPTFGQGTKLEIK |
| J662M2S3#72 | CDR-L1 | Residues 24-34 | RASQDISNFLN |
| VL | | of SEQ ID | |
| | | NO.: 93 | |
| J662M2S3#72 | CDR-L2 | Residues 50-56 | YTSRLQS |
| VL | | of SEQ ID | |
| | | NO.: 93 | |
| J662M2S3#72 | CDR-L3 | Residues 89-97 | QQGNTQPPT |
| VL | | of SEQ | |
| | | ID NO.: 93 | |

[0060] In an embodiment, the antigen binding domain comprises the VH region chosen from any one of SEQ ID NOs: 22, 24, 26, 28, 30, 32, 34-58, 74-83, 94-266, 478-486, 496-675, 738-762, 778-956, 1053-1062, 1073, 1075, and 1077, or one, two, or three CDRs therefrom. In another embodiment, the antigen binding domain comprises the VL region chosen from any one of SEQ ID NOs: 23, 25, 27, 29, 31, 33, 59-73, 84-93, 267-477, 487-495, 676-737, 763-777, 957-1052, 1063-1072, 1074, 1076, and 1078, or one, two, or three CDRs therefrom. In a particular embodiment, the antigen binding domain comprises a VH region and a VL region, for example, wherein the VH region comprises SEQ ID NOs: 22, 24, 26, 28, 30, 32, 34-58, 74-83, 94-266, 478-486, 496-675, 738-762, 778-956, 1053-1062, 1073, 1075, and 1077, or one, two, or three CDRs therefrom, and the VL region comprises SEQ ID NOs: 23, 25, 27, 29, 31, 33, 59-73, 84-93, 267-477, 487-495, 676-737, 763-777, 957-1052, 1063-1072, 1074, 1076, and 1078, or one, two, or three CDRs therefrom.

[0061] In an embodiment where the VH and/or the VL CDR sequences are provided above, the human acceptor framework comprises at least one amino acid sequence selected from: SEQ ID NOs: 6-21. In a particular embodiment, the human acceptor framework comprises an amino acid sequence selected from: SEQ IN NOs: 9, 10, 11, 12, 15, 16, 17, and 21. In another embodiment, the human acceptor framework comprises at least one framework region amino acid substitution, wherein the amino acid sequence of the framework is at least 65% identical to the sequence of the human acceptor framework and comprises at least 70 amino acid residues identical to the human acceptor framework. In another embodiment, the human acceptor framework comprises at least one framework region amino acid substitution at a key residue. The key residue selected from: a residue adjacent to a CDR; a glycosylation site residue; a rare residue; a residue capable of interacting with human TNF-α; a residue capable of interacting with a CDR; a canonical residue; a contact residue between heavy chain variable region and light chain variable region; a residue within a Vernier zone; and a residue in a region that overlaps between a Chothia-defined variable heavy chain CDR1 and a Kabat-defined first heavy chain framework. In an embodiment, the key residue is selected from: H1, H12, H24, H27, H29, H37, H48, H49, H67, H71, H73, H76, H78, L13, L43, L58, L70, and L80. In an embodiment, the VH mutation is selected from: Q1E, I12V, A24V, G27F, I29L, V29F F29L I37V, I48L, V48L, S49G, V67L, F67L, V71K, R71K, T73N, N76S, L78I, and F78I. In another embodiment, the VL mutation is selected from: V13L, A43S, I58V, E70D, and S80P. In an embodiment, the binding protein comprises two variable domains, wherein the two variable domains have amino acid sequences selected from: SEQ ID NOS: 22 and 23; 23 and 24; 24 and 25; 26 and 27; 28 and 29; 30 and 31; or 32 and 33.

### III. Production of Binding Proteins and Binding Protein-Producing Cell Lines

[0062] In an embodiment, TNF-α binding proteins disclosed herein exhibit a high capacity to reduce or to neutralize TNF-α activity, e.g., as assessed by any one of several in vitro and in vivo assays known in the art. Alternatively, TNF-α binding proteins disclosed herein, also exhibit a high capacity to increase or agonize TNF-α activity.

[0063] In particular embodiments, the isolated binding protein, or antigen-binding portion thereof, binds human TNF-α, wherein the binding protein, or antigen-binding portion thereof, dissociates from human TNF-α with a k_{off} rate constant of about 0.1 s⁻¹ or less, as determined by surface plasmon resonance, such as 1×10⁻² s⁻¹ or less, 1×10⁻³ s⁻¹ or less, 1×10⁻⁴ s⁻¹ or less, 1×10⁻⁵ s⁻¹ or less and 1×10⁻⁶ s⁻¹ or less; or which inhibits human TNF-α activity with an IC₅₀ of about 1×10⁻⁶ M or less, such as 1×10⁻⁷ M or less, 1×10⁻⁸ M or less, 1×10⁻⁹ M or less, 1×10⁻¹⁰ M or less and 1×10⁻¹¹ M or less. In certain embodiments, the binding protein comprises a heavy chain constant region, such as an IgG1, IgG2, IgG3, IgG4, IgA, IgE, IgM or IgD constant region. In an embodiment, the heavy chain constant region is an IgG1 heavy chain constant region or an IgG4 heavy chain constant region. Furthermore, the binding protein can comprise a light chain constant region, either a kappa light chain constant region or a lambda light chain constant region. In another embodiment, the binding protein comprises a kappa light chain constant region. Alternatively, the binding protein portion can be, for example, a Fab fragment or a single chain Fv fragment.

[0064] Replacements of amino acid residues in the Fc portion to alter binding protein effector function are known in the art (See U.S. Pat. Nos. 5,648,260 and 5,624,821). The Fc portion of a binding protein mediates several important effector functions, e.g., cytokine induction, ADCC, phagocytosis, complement dependent cytotoxicity (CDC) and half-life/clearance rate of antibody and antigen-antibody complexes. In some cases these effector functions are desirable for therapeutic antibody but in other cases might be unnecessary or even deleterious, depending on the therapeutic objectives. Certain human IgG isotypes, particularly IgG1 and IgG3, mediate ADCC and CDC via binding to FcγRs and complement C1q, respectively. Neonatal Fc receptors (FcRn) are the critical components determining the circulating half-life of antibodies. In still another embodiment at least one amino acid residue is replaced in the constant region of the binding protein, for example the Fc region of the binding protein, such that effector functions of the binding protein are altered.

[0065] One embodiment provides a labeled binding protein wherein an antibody or antibody portion disclosed herein is derivatized or linked to another functional molecule (e.g., another peptide or protein). For example, a labeled binding protein disclosed herein can be derived by functionally linking an antibody or antibody portion disclosed herein (by chemical coupling, genetic fusion, noncovalent association or otherwise) to one or more other molecular entities, such as another antibody (e.g., a bispecific antibody or a diabody), a detectable agent, a cytotoxic agent, a pharmaceutical agent, and/or a protein or peptide that can mediate associate of the antibody or antibody portion with another molecule (such as a streptavidin core region or a polyhistidine tag).

[0066] Useful detectable agents with which an antibody or antibody portion disclosed herein may be derivatized include fluorescent compounds. Exemplary fluorescent detectable agents include fluorescein, fluorescein isothiocyanate, rhodamine, 5-dimethylamine-1-napthalenesulfonyl chloride, phycoerythrin and the like. An antibody may also be derivatized with detectable enzymes, such as alkaline phosphatase, horseradish peroxidase, glucose oxidase and the like. When an antibody is derivatized with a detectable enzyme, it is detected by adding additional reagents that the enzyme uses to produce a detectable reaction product. For example, when the detectable agent horseradish peroxidase is present, the addition of hydrogen peroxide and diaminobenzidine leads to a colored reaction product, which is detectable. An antibody may also be derivatized with biotin, and detected through indirect measurement of avidin or streptavidin binding.

[0067] Another embodiment of the disclosure provides a crystallized binding protein. In an embodiment, provided are crystals of whole TNF-α binding proteins and fragments thereof as disclosed herein, and formulations and compositions comprising such crystals. In one embodiment the crystallized binding protein has a greater half-life in vivo than the soluble counterpart of the binding protein. In another embodiment the binding protein retains biological activity after crystallization.

[0068] Crystallized binding protein disclosed herein may be produced according methods known in the art and as disclosed in PCT Publication WO 02/72636.

[0069] Another embodiment of the disclosure provides a glycosylated binding protein wherein the binding protein or antigen-binding portion thereof comprises one or more carbohydrate residues. Nascent in vivo protein production may undergo further processing, known as post-translational modification. In particular, sugar (glycosyl) residues may be added enzymatically, a process known as glycosylation. The resulting proteins bearing covalently linked oligosaccharide side chains are known as glycosylated proteins or glycoproteins. Protein glycosylation depends on the amino acid sequence of the protein of interest, as well as the host cell in which the protein is expressed. Different organisms may produce different glycosylation enzymes (e.g., glycosyltransferases and glycosidases), and have different substrates (nucleotide sugars) available. Due to such factors, protein glycosylation pattern, and composition of glycosyl residues, may differ depending on the host system in which the particular protein is expressed. Glycosyl residues useful in the disclosure may include, but are not limited to, glucose, galactose, mannose, fucose, n-acetylglucosamine and sialic acid. In an embodiment, the glycosylated binding protein comprises glycosyl residues such that the glycosylation pattern is human.

[0070] It is known to those skilled in the art that differing protein glycosylation may result in differing protein characteristics. For instance, the efficacy of a therapeutic protein produced in a microorganism host, such as yeast, and glycosylated utilizing the yeast endogenous pathway may be reduced compared to that of the same protein expressed in a mammalian cell, such as a CHO cell line. Such glycoproteins may also be immunogenic in humans and show reduced half-life in vivo after administration. Specific receptors in humans and other animals may recognize specific glycosyl residues and promote the rapid clearance of the protein from the bloodstream. Other adverse effects may include changes in protein folding, solubility, susceptibility to proteases, trafficking, transport, compartmentalization, secretion, recognition by other proteins or factors, antigenicity, or allergenicity. Accordingly, a practitioner may prefer a therapeutic protein with a specific composition and pattern of glycosylation, for example glycosylation composition and pattern identical, or at least similar, to that produced in human cells or in the species-specific cells of the intended subject animal.

[0071] Expressing glycosylated proteins different from that of a host cell may be achieved by genetically modifying the host cell to express heterologous glycosylation enzymes. Using techniques known in the art a practitioner may generate antibodies or antigen-binding portions thereof exhibiting human protein glycosylation. For example, yeast strains have been genetically modified to express non-naturally occurring glycosylation enzymes such that glycosylated proteins (glycoproteins) produced in these yeast strains exhibit protein glycosylation identical to that of animal cells, especially human cells (U.S. Pat. Nos. 7,449,308 and 7,029,872).

[0072] Further, it will be appreciated by one skilled in the art that a protein of interest may be expressed using a library of host cells genetically engineered to express various glycosylation enzymes, such that member host cells of the library produce the protein of interest with variant glycosylation patterns. A practitioner may then select and isolate the protein of interest with particular novel glycosylation patterns. In an embodiment, the protein having a particularly selected novel glycosylation pattern exhibits improved or altered biological properties.

### IV. Uses of TNF-α Binding Proteins

[0073] Given their ability to bind to human TNF-α, e.g., the human TNF-α binding proteins, or portions thereof, disclosed herein can be used to detect TNF-α (e.g., in a biological sample, such as serum or plasma), using a conventional immunoassay, such as an enzyme linked immunosorbent assays (ELISA), an radioimmunoassay (RIA) or tissue immunohistochemistry. A method for detecting TNF-α in a biological sample is provided comprising contacting a biological sample with a binding protein, or binding protein portion, disclosed herein and detecting either the binding protein (or binding protein portion) bound to TNF-α or unbound binding protein (or binding protein portion), to thereby detect TNF-α in the biological sample. The binding protein is directly or indirectly labeled with a detectable substance to facilitate detection of the bound or unbound antibody. Suitable detectable substances include various enzymes, prosthetic groups, fluorescent materials, luminescent materials and radioactive materials. Examples of suitable enzymes include horseradish peroxidase, alkaline phosphatase, β-galactosidase, or acetylcholinesterase; examples of suitable prosthetic group complexes include streptavidin/biotin and avidin/biotin; examples of suitable fluorescent materials include umbelliferone, fluorescein, fluorescein isothiocyanate, rhodamine, dichlorotriazinylamine fluorescein, dansyl chloride or phycoerythrin; an example of a luminescent material includes luminol; and examples of suitable radioactive material include ³H, ¹⁴C, ³⁵S, ⁹⁰Y, ⁹⁹Tc, ¹¹¹In, ¹²⁵I, ¹³¹I, ¹⁷⁷Lu, ¹⁶⁶Ho, or ¹⁵³Sm.

[0074] Alternative to labeling the binding protein, human TNF-α can be assayed in biological fluids by a competition immunoassay utilizing rhTNF-α standards labeled with a detectable substance and an unlabeled human TNF-α binding protein. In this assay, the biological sample, the labeled rhTNF-α standards and the human TNF-α binding protein are combined and the amount of labeled rhTNF-α standard bound to the unlabeled binding protein is determined. The amount of human TNF-α in the biological sample is inversely proportional to the amount of labeled rhTNF-α standard bound to the TNF-α binding protein. Similarly, human TNF-α can also be assayed in biological fluids by a competition immunoassay utilizing rhTNF-α standards labeled with a detectable substance and an unlabeled human TNF-α binding protein.

[0075] In an embodiment, the binding proteins and binding protein portions disclosed herein are capable of neutralizing TNF-α activity, e.g., human TNF-α activity, both in vitro and in vivo. In another embodiment, the binding proteins and binding protein portions disclosed herein are capable of increasing or agonizing human TNF-α activity, e.g., human TNF-α activity. Accordingly, such binding proteins and binding protein portions disclosed herein can be used to inhibit or increase hTNF-α activity, e.g., in a cell culture containing hTNF-α, in human subjects or in other mammalian subjects having TNF-α with which a binding protein disclosed herein cross-reacts. In one embodiment, a method for inhibiting or increasing hTNF-α activity is provided comprising contacting hTNF-α with a binding protein or binding protein portion disclosed herein such that hTNF-α activity is inhibited or increased. For example, in a cell culture containing, or suspected of containing hTNF-α, a binding protein or binding protein portion disclosed herein can be added to the culture medium to inhibit or increase hTNF-α activity in the culture.

[0076] In another embodiment, a method is provided for reducing or increasing hTNF-α activity in a subject, advantageously from a subject suffering from a disease or disorder in which TNF-α-activity is detrimental or, alternatively, beneficial. Methods for reducing or increasing TNF-α activity in a subject suffering from such a disease or disorder is provided, which method comprises administering to the subject a binding protein or binding protein portion disclosed herein such that TNF-α activity in the subject is reduced or increased. In a particular embodiment, the TNF-α is human TNF-α, and the subject is a human subject. Alternatively, the subject can be a mammal expressing a TNF-α to which a binding protein provided is capable of binding. Still further the subject can be a mammal into which TNF-α has been introduced (e.g., by administration of TNF-α or by expression of a TNF-α transgene). A binding protein disclosed herein can be administered to a human subject for therapeutic purposes. Moreover, a binding protein disclosed herein can be administered to a non-human mammal expressing a TNF-α with which the binding protein is capable of binding for veterinary purposes or as an animal model of human disease. Regarding the latter, such animal models may be useful for evaluating the therapeutic efficacy of binding proteins disclosed herein (e.g., testing of dosages and time courses of administration).

[0077] The term “a disorder in which TNF-α activity is detrimental” includes diseases and other disorders in which the presence of TNF-α activity in a subject suffering from the disorder has been shown to be or is suspected of being either responsible for the pathophysiology of the disorder or a factor that contributes to a worsening of the disorder. Accordingly, a disorder in which TNF-α activity is detrimental is a disorder in which reduction of TNF-α activity is expected to alleviate the symptoms and/or progression of the disorder. Such disorders may be evidenced, for example, by an increase in the concentration of TNF-α in a biological fluid of a subject suffering from the disorder (e.g., an increase in the concentration of TNF-α in serum, plasma, synovial fluid, etc. of the subject), which can be detected, for example, using an anti-TNF-α antibody as described above. Non-limiting examples of disorders that can be treated with the binding proteins disclosed herein include those disorders discussed in the section below pertaining to pharmaceutical compositions of the antibodies disclosed herein.

[0078] Alternatively, the term “a disorder in which TNF-α activity is beneficial” include diseases and other disorders in which the presence of TNF-α activity in a subject suffering from the disorder has been shown to be or is suspected of being either beneficial for treating the pathophysiology of the disorder or a factor that contributes to a treatment of the disorder. Accordingly, a disorder in which TNF-α activity is beneficial is a disorder in which an increase of TNF-α activity is expected to alleviate the symptoms and/or progression of the disorder. Non-limiting examples of disorders that can be treated with the antibodies disclosed herein include those disorders discussed in the section below pertaining to pharmaceutical compositions of the antibodies disclosed herein.

### V. Pharmaceutical Compositions

[0079] Pharmaceutical compositions are also provided comprising a binding protein, or antigen-binding portion thereof, disclosed herein and a pharmaceutically acceptable carrier. The pharmaceutical compositions comprising binding protein disclosed herein are for use in, but not limited to, diagnosing, detecting, or monitoring a disorder, in preventing, treating, managing, or ameliorating of a disorder or one or more symptoms thereof, and/or in research. In a specific embodiment, a composition comprises one or more binding proteins disclosed herein. In another embodiment, the pharmaceutical composition comprises one or more binding proteins disclosed herein and one or more prophylactic or therapeutic agents other than binding proteins disclosed herein for treating a disorder in which TNF-α activity is detrimental. In a particular embodiment, the prophylactic or therapeutic agents known to be useful for or having been or currently being used in the prevention, treatment, management, or amelioration of a disorder or one or more symptoms thereof. In accordance with these embodiments, the composition may further comprise of a carrier, diluent or excipient.

[0080] The binding proteins and binding protein-portions disclosed herein can be incorporated into pharmaceutical compositions suitable for administration to a subject. Typically, the pharmaceutical composition comprises a binding protein or binding protein portion disclosed herein and a pharmaceutically acceptable carrier. The term “pharmaceutically acceptable carrier” includes any and all solvents, dispersion media, coatings, antibacterial and antifungal agents, isotonic and absorption delaying agents, and the like that are physiologically compatible. Examples of pharmaceutically acceptable carriers include one or more of water, saline, phosphate buffered saline, dextrose, glycerol, ethanol and the like, as well as combinations thereof. In many cases, isotonic agents, for example, sugars, polyalcohols such as mannitol, sorbitol, or sodium chloride in the composition, may be included. Pharmaceutically acceptable carriers may further comprise minor amounts of auxiliary substances such as wetting or emulsifying agents, preservatives or buffers, which enhance the shelf life or effectiveness of the binding protein or binding protein portion.

[0081] Various delivery systems are known and can be used to administer one or more binding proteins disclosed herein or the combination of one or more binding proteins disclosed herein and a prophylactic agent or therapeutic agent useful for preventing, managing, treating, or ameliorating a disorder or one or more symptoms thereof, e.g., encapsulation in liposomes, microparticles, microcapsules, recombinant cells capable of expressing the binding protein or binding protein fragment, receptor-mediated endocytosis (see, e. g., Wu and Wu (1987) J. Biol. Chem. 262:4429-4432), construction of a nucleic acid as part of a retroviral or other vector, etc. Methods of administering a prophylactic or therapeutic agent disclosed herein include, but are not limited to, parenteral administration (e.g., intradermal, intramuscular, intraperitoneal, intravenous and subcutaneous), epidural administration, intratumoral administration, and mucosal administration (e.g., intranasal and oral routes). In addition, pulmonary administration can be employed, e.g., by use of an inhaler or nebulizer, and formulation with an aerosolizing agent. In one embodiment, a binding protein disclosed herein, combination therapy, or a composition disclosed herein is administered using Alkermes AIR® pulmonary drug delivery technology (Alkermes, Inc., Cambridge, Mass.). In a specific embodiment, prophylactic or therapeutic agents disclosed herein are administered intramuscularly, intravenously, intratumorally, orally, intranasally, pulmonary, or subcutaneously. The prophylactic or therapeutic agents may be administered by any convenient route, for example by infusion or bolus injection, by absorption through epithelial or mucocutaneous linings (e.g., oral mucosa, rectal and intestinal mucosa, etc.) and may be administered together with other biologically active agents. Administration can be systemic or local.

[0082] In a specific embodiment, it may be desirable to administer the prophylactic or therapeutic agents disclosed herein locally to the area in need of treatment; this may be achieved by, for example, and not by way of limitation, local infusion, by injection, or by means of an implant, said implant being of a porous or non-porous material, including membranes and matrices, such as sialastic membranes, polymers, fibrous matrices (e.g., Tissuel®), or collagen matrices. In one embodiment, an effective amount of one or more binding proteins disclosed herein antagonists is administered locally to the affected area to a subject to prevent, treat, manage, and/or ameliorate a disorder or a symptom thereof. In another embodiment, an effective amount of one or more binding proteins disclosed herein is administered locally to the affected area in combination with an effective amount of one or more therapies (e.g., one or more prophylactic or therapeutic agents) other than an antibody disclosed herein of a subject to prevent, treat, manage, and/or ameliorate a disorder or one or more symptoms thereof.

[0083] In a specific embodiment, where the composition disclosed herein is a nucleic acid encoding a prophylactic or therapeutic agent, the nucleic acid can be administered in vivo to promote expression of its encoded prophylactic or therapeutic agent, by constructing it as part of an appropriate nucleic acid expression vector and administering it so that it becomes intracellular, e.g., by use of a retroviral vector (see U.S. Pat. No. 4,980,286), or by direct injection, or by use of microparticle bombardment (e.g., a gene gun; Biolistic, DuPont), or coating with lipids or cell-surface receptors or transfecting agents, or by administering it in linkage to a homeobox-like peptide which is known to enter the nucleus (see, e.g., Joliot et al. (1991) Proc. Natl. Acad. Sci. USA 88:1864-1868). Alternatively, a nucleic acid can be introduced intracellularly and incorporated within host cell DNA for expression by homologous recombination.

[0084] The method disclosed herein may comprise administration of a composition formulated for parenteral administration by injection (e.g., by bolus injection or continuous infusion). Formulations for injection may be presented in unit dosage form (e.g., in ampoules or in multi-dose containers) with an added preservative. The compositions may take such forms as suspensions, solutions or emulsions in oily or aqueous vehicles, and may contain formulatory agents such as suspending, stabilizing and/or dispersing agents. Alternatively, the active ingredient may be in powder form for constitution with a suitable vehicle (e.g., sterile pyrogen-free water) before use.

[0085] The methods disclosed herein may additionally comprise of administration of compositions formulated as depot preparations. Such long acting formulations may be administered by implantation (e.g., subcutaneously or intramuscularly) or by intramuscular injection. Thus, for example, the compositions may be formulated with suitable polymeric or hydrophobic materials (e.g., as an emulsion in an acceptable oil) or ion exchange resins, or as sparingly soluble derivatives (e.g., as a sparingly soluble salt).

[0086] The methods disclosed herein encompass administration of compositions formulated as neutral or salt forms. Pharmaceutically acceptable salts include those formed with anions such as those derived from hydrochloric, phosphoric, acetic, oxalic, tartaric acids, etc., and those formed with cations such as those derived from sodium, potassium, ammonium, calcium, ferric hydroxides, isopropylamine, triethylamine, 2-ethylamino ethanol, histidine, procaine, etc.

[0087] Generally, the ingredients of compositions are supplied either separately or mixed together in unit dosage form, for example, as a dry lyophilized powder or water free concentrate in a hermetically sealed container such as an ampoule or sachette indicating the quantity of active agent. Where the mode of administration is infusion, composition can be dispensed with an infusion bottle containing sterile pharmaceutical grade water or saline. Where the mode of administration is by injection, an ampoule of sterile water for injection or saline can be provided so that the ingredients may be mixed prior to administration.

[0088] In particular, it is also provided that one or more of the prophylactic or therapeutic agents, or pharmaceutical compositions disclosed herein is packaged in a hermetically sealed container such as an ampoule or sachette indicating the quantity of the agent. In one embodiment, one or more of the prophylactic or therapeutic agents, or pharmaceutical compositions disclosed herein is supplied as a dry sterilized lyophilized powder or water free concentrate in a hermetically sealed container and can be reconstituted (e.g., with water or saline) to the appropriate concentration for administration to a subject. In an embodiment, one or more of the prophylactic or therapeutic agents or pharmaceutical compositions disclosed herein is supplied as a dry sterile lyophilized powder in a hermetically sealed container at a unit dosage of at least 5 mg, at least 10 mg, at least 15 mg, at least 25 mg, at least 35 mg, at least 45 mg, at least 50 mg, at least 75 mg, or at least 100 mg. The lyophilized prophylactic or therapeutic agents or pharmaceutical compositions disclosed herein should be stored at between 2° C. and 8° C. in its original container and the prophylactic or therapeutic agents, or pharmaceutical compositions disclosed herein should be administered within 1 week, within 5 days, within 72 hours, within 48 hours, within 24 hours, within 12 hours, within 6 hours, within 5 hours, within 3 hours, or within 1 hour after being reconstituted. In an alternative embodiment, one or more of the prophylactic or therapeutic agents or pharmaceutical compositions disclosed herein is supplied in liquid form in a hermetically sealed container indicating the quantity and concentration of the agent. In an embodiment, the liquid form of the administered composition is supplied in a hermetically sealed container at least 0.25 mg/ml, at least 0.5 mg/ml, at least 1 mg/ml, at least 2.5 mg/ml, at least 5 mg/ml, at least 8 mg/ml, at least 10 mg/ml, at least 15 mg/kg, at least 25 mg/ml, at least 50 mg/ml, at least 75 mg/ml or at least 100 mg/ml. The liquid form should be stored at between 2° C. and 8° C. in its original container.

[0089] The binding proteins and binding protein-portions disclosed herein can be incorporated into a pharmaceutical composition suitable for parenteral administration. In an embodiment, the binding protein or binding protein-portions will be prepared as an injectable solution containing 0.1-250 mg/ml binding protein. The injectable solution can be composed of either a liquid or lyophilized dosage form in a flint or amber vial, ampoule or pre-filled syringe. The buffer can be L-histidine (1-50 mM), optimally 5-10 mM, at pH 5.0 to 7.0 (optimally pH 6.0). Other suitable buffers include but are not limited to, sodium succinate, sodium citrate, sodium phosphate or potassium phosphate. Sodium chloride can be used to modify the toxicity of the solution at a concentration of 0-300 mM (optimally 150 mM for a liquid dosage form). Cryoprotectants can be included for a lyophilized dosage form, principally 0-10% sucrose (optimally 0.5-1.0%). Other suitable cryoprotectants include trehalose and lactose. Bulking agents can be included for a lyophilized dosage form, principally 1-10% mannitol (optimally 2-4%). Stabilizers can be used in both liquid and lyophilized dosage forms, principally 1-50 mM L-Methionine (optimally 5-10 mM). Other suitable bulking agents include glycine, arginine, can be included as 0-0.05% polysorbate-80 (optimally 0.005-0.01%). Additional surfactants include but are not limited to polysorbate 20 and BRIJ surfactants.

[0090] Typical compositions are in the form of injectable or infusible solutions, such as compositions similar to those used for passive immunization of humans with other antibodies. Therapeutic compositions typically must be sterile and stable under the conditions of manufacture and storage. The composition can be formulated as a solution, microemulsion, dispersion, liposome, or other ordered structure suitable to high drug concentration. Sterile injectable solutions can be prepared by incorporating the active compound (i.e., binding protein or binding protein portion) in the required amount in an appropriate solvent with one or a combination of ingredients enumerated above, as required, followed by filtered sterilization. Generally, dispersions are prepared by incorporating the active compound into a sterile vehicle that contains a basic dispersion medium and the required other ingredients from those enumerated above. In the case of sterile, lyophilized powders for the preparation of sterile injectable solutions, the methods of preparation include vacuum drying and spray-drying that yields a powder of the active ingredient plus any additional desired ingredient from a previously sterile-filtered solution thereof. The proper fluidity of a solution can be maintained, for example, by the use of a coating such as lecithin, by the maintenance of the required particle size in the case of dispersion and by the use of surfactants. Prolonged absorption of injectable compositions can be brought about by including, in the composition, an agent that delays absorption, for example, monostearate salts and gelatin.

[0091] As will be appreciated by the skilled artisan, the route and/or mode of administration will vary depending upon the desired results. In certain embodiments, the active compound may be prepared with a carrier that will protect the compound against rapid release, such as a controlled release formulation, including implants, transdermal patches, and microencapsulated delivery systems. Biodegradable, biocompatible polymers can be used, such as ethylene vinyl acetate, polyanhydrides, polyglycolic acid, collagen, polyorthoesters, and polylactic acid. Many methods for the preparation of such formulations are patented or generally known to those skilled in the art. See, e.g., Sustained and Controlled Release Drug Delivery Systems, J. R. Robinson, ed., Marcel Dekker, Inc., New York, 1978.

[0092] Supplementary active compounds can also be incorporated into the compositions. In certain embodiments, a binding protein or binding protein portion disclosed herein is coformulated with and/or coadministered with one or more additional therapeutic agents that are useful for treating disorders in which TNF-α activity is detrimental. For example, an anti-hTNF-α antibody or antibody portion disclosed herein may be coformulated and/or coadministered with one or more additional antibodies that bind other targets (e.g., antibodies that bind other cytokines or that bind cell surface molecules). Furthermore, one or more binding proteins disclosed herein may be used in combination with two or more of the foregoing therapeutic agents. Such combination therapies may advantageously utilize lower dosages of the administered therapeutic agents, thus avoiding possible toxicities or complications associated with the various monotherapies.

[0093] In certain embodiments, a binding protein to TNF-α or fragment thereof is linked to a half-life extending vehicle known in the art. Such vehicles include, but are not limited to, the Fc domain, polyethylene glycol, and dextran. Such vehicles are described, e.g., in U.S. Pat. No. 6,660,843.

[0094] In a specific embodiment, nucleic acid sequences comprising nucleotide sequences encoding a binding protein disclosed herein or another prophylactic or therapeutic agent disclosed herein are administered to treat, prevent, manage, or ameliorate a disorder or one or more symptoms thereof by way of gene therapy. Gene therapy refers to therapy performed by the administration to a subject of an expressed or expressible nucleic acid. In this embodiment of the disclosure, the nucleic acids produce their encoded binding protein or prophylactic or therapeutic agent disclosed herein that mediates a prophylactic or therapeutic effect.

[0095] Any of the methods for gene therapy available in the art can be used according to the present disclosure.

[0096] TNF-α plays a critical role in the pathology associated with a variety of diseases involving immune and inflammatory elements, such as autoimmune diseases, particularly those assocated with inflammation, including Crohn's disease, psoriasis (including plaque psoriasis), arthritis (including rheumatoid arthritis, psoratic arthritis, osteoarthritis, or juvenile idiopathic arthritis), multiple sclerosis, systemic lupus erythematosus, and ankylosing spondylitis. Therefore, the binding proteins herein may be used to treat these disorders. In another embodiment, the disorder is a respiratory disorder; asthma; allergic and nonallergic asthma; asthma due to infection; asthma due to infection with respiratory syncytial virus (RSV); chronic obstructive pulmonary disease (COPD); a condition involving airway inflammation; eosinophilia; fibrosis and excess mucus production; cystic fibrosis; pulmonary fibrosis; an atopic disorder; atopic dermatitis; urticaria; eczema; allergic rhinitis; allergic enterogastritis; an inflammatory and/or autoimmune condition of the skin; an inflammatory and/or autoimmune condition of gastrointestinal organs; inflammatory bowel diseases (IBD); ulcerative colitis; an inflammatory and/or autoimmune condition of the liver; liver cirrhosis; liver fibrosis; liver fibrosis caused by hepatitis B and/or C virus; scleroderma; tumors or cancers; hepatocellular carcinoma; glioblastoma; lymphoma; Hodgkin's lymphoma; a viral infection; a bacterial infection; a parasitic infection; HTLV-1 infection; suppression of expression of protective type 1 immune responses, suppression of expression of a protective type 1 immune response during vaccination, neurodegenerative diseases, neuronal regeneration, and spinal cord injury.

[0097] It will be readily apparent to those skilled in the art that other suitable modifications and adaptations of the methods disclosed herein may be made using suitable equivalents without departing from the scope of the invention or the embodiments disclosed herein. Having now described the present disclosure in detail, the same will be more clearly understood by reference to the following examples, which are included for purposes of illustration only and are not intended to be limiting of the invention.

### EXAMPLES

### Example 1

### Identification of Fully Human Antibodies to TNF by in vitro Display Systems

### 1.1: Antibody Selections

[0098] Fully human anti-human TNF monoclonal antibodies were isolated by in vitro display technologies from human antibody libraries by their ability to bind recombinant human TNF proteins. The amino acid sequences of the variable heavy (VH) and variable light (VL) chains were determined from DNA sequencing and listed in Table 10.

TABLE 10
Individual clones sequences

| Protein | | | Sequence |
|---|---|---|---|
| region | | SEQ ID NO: | 123456789012345678901234567890 |
| AE11-1 VH | | 22 | EVQLVQSGAEVKKPGASVKVSCKASGYTFT |
| | | | SYDVNWVRQATGQGLEWMGMNPNSGNTGY |
| | | | AQKFQGRVTITADESTSTAYMELSSLRSED |
| | | | TAVYYCAIFDSDYMDVWGKGTLVTVSS |
| AE11-1 VH | CDR- | Residues 31-35 | SYDVN |
| | H1 | of SEQ ID | |
| | | NO.: 22 | |
| AE11-1 VH | CDR- | Residues 50-66 | WMNPNSGNTGYAQKFQG |
| | H2 | of SEQ ID | |
| | | NO.: 22 | |
| AE11-1 VH | CDR- | Residues 99-106 | FDSDYMDV |
| | H3 | of SEQ ID | |
| | | NO.: 22 | |
| AE11-1 VL | | 23 | SYELTQPPSVSLSPGQTARITCSGDALPKQ |
| | | | YAYWYQQKPGQAPVLVIYKDTERPSGIPER |
| | | | FSGSSSGTTVTLTISGAQAEDEADYYCQSA |
| | | | DSSGTSWVFGGGTKLTVL |
| AE11-1 VL | CDR- | Residues 23-33 | SGDALPKQYAY |
| | L1 | of SEQ ID | |
| | | NO.: 23 | |
| AE11-1 VL | CDR- | Residues 49-55 | KDTERPS |
| | L2 | of SEQ ID | |
| | | NO.: 23 | |
| AE11-1 VL | CDR- | Residues 89-98 | SADSSGTSWV |
| | L3 | of SEQ ID | |
| | | NO.: 23 | |
| AE11-5 VH | | 24 | EVQLVQSGAEVKKPGSSAKVSCKASGGTFS |
| | | | SYAISWVRQAPGQGLEWMGGIIPILGTANY |
| | | | AQKFLGRVTITADESTSTVYMELSSLRSED |
| | | | TAVYYCARGLYYDPTRADYWGQGTLVTVSS |
| AE11-5 VH | CDR- | Residues 31-35 | SYAIS |
| | H1 | of SEQ ID | |
| | | NO.: 24 | |
| AE11-5 VH | CDR- | Residues 50-66 | GIIPILGTANYAQKFLG |
| | H2 | of SEQ ID | |
| | | NO.: 24 | |
| AE11-5 VH | CDR- | Residues 99-109 | GLYYDPTRADY |
| | H3 | of SEQ ID | |
| | | NO.: 24 | |
| AE11-5 VL | | 25 | DIVMTQSPDFHSVTPKEKVTITCRASQSIG |
| | | | SSLHWYQQKPDQSPKLLIRHASQSISGVPS |
| | | | RFSGSGSGTDFTLTIHSLEAEDAATYYCHQ |
| | | | SSSSPPPTFGQGTQVEIK |
| AE11-5 VL | CDR- | Residues 24-34 | RASQSIGSSLH |
| | L1 | of SEQ ID | |
| | | NO.: 25 | |
| AE11-5 VL | CDR- | Residues 50-56 | HASQSIS |
| | L2 | of SEQ ID | |
| | | NO.: 25 | |
| AE11-5 VL | CDR- | Residues 89-98 | HQSSSSPPPT |
| | L3 | of SEQ ID | |
| | | NO.: 25 | |
| TNF-JK1 VH | | 26 | EVQLVESGGGLVQPGGSLRLSCATSGFTFN |
| | | | NYWMSWVRQAPGKGLEWVANINHDESEKYY |
| | | | VDSAKGRFTISRDNAEKSLFLQMNSLRAED |
| | | | TAVYYCARIIRGRVGFDYYNYAMDVWGQGT |
| | | | LVTVSS |
| TNF-JK1 VH | CDR- | Residues 31-35 | NYWMS |
| | H1 | of SEQ ID | |
| | | NO.: 26 | |
| TNF-JK1 VH | CDR- | Residues 50-66 | NINHDESEKYYVDSAKG |
| | H2 | of SEQ ID | |
| | | NO.: 26 | |
| TNF-JK1 VH | CDR- | Residues 99-115 | IIRGRVGFDYYNYAMDV |
| | H3 | of SEQ ID | |
| | | NO.: 26 | |
| TNF-JK1 VL | | 27 | DIRLTQSPSPLSASVGDRVTITCRASQSIG |
| | | | NYLNWYQHKPGKAPKLLIYAASSLQSGVPS |
| | | | RFSGTGSGTDFTLTISSLQPEDFATYYCQE |
| | | | SYSLIFAGGTKVEIK |
| TNF-JK1 VL | CDR- | Residues 24-34 | RASQSIGNYLN |
| | L1 | of SEQ ID | |
| | | NO.: 27 | |
| TNF-JK1 VL | CDR- | Residues 50-56 | AASSLQS |
| | L2 | of SEQ ID | |
| | | NO.: 27 | |
| TNF-JK1 VL | CDR- | Residues 89-95 | QESYSLI |
| | L3 | of SEQ ID | |
| | | NO.: 27 | |
| TNF-Y7C VH | | 28 | EVQLVQSGAEVKKPGASVKVSCKTSGYTFS |
| | | | NYDINWVRQPTGQGLEWMGWMDPNNGNTGY |
| | | | AQKFVGRVTMTRDTSKTTAYLELSGLKSED |
| | | | TAVYYCARSSGSGGTWYKEYFQSWGQGTMV |
| | | | TVSS |
| TNF-Y7C VH | CDR- | Residues 31-35 | NYDIN |
| | H1 | of SEQ ID | |
| | | NO.: 28 | |
| TNF-Y7C VH | CDR- | Residues 50-66 | WMDPNNGNTGYAQKFVG |
| | H2 | of SEQ ID | |
| | | NO.: 28 | |
| TNF-Y7C VH | CDR- | Residues 99-112 | KSSGSGGTWYKEYFQS |
| | H3 | of SEQ ID | |
| | | NO.: 28 | |
| TNF-Y7C VL | | 29 | DIVMTQSPLSLPVTPGEPASISCRSSQSLL |
| | | | HSNGYNYLDWYLQKPGQFPQLLIYLGSYRA |
| | | | SGVPDRFSGSGSGTDFTLKISRVEAEDVGV |
| | | | YYCMQRIEFPPGTFGQGTKLGIK |
| TNF-Y7C VL | CDR- | Residues 24-39 | RSSQSLLHSNGYNYLD |
| | L1 | of SEQ ID | |
| | | NO.: 29 | |
| TNF-Y7C VL | CDR- | Residues 55-61 | LGSYRAS |
| | L2 | of SEQ ID | |
| | | NO.: 29 | |
| TNF-Y7C VL | CDR- | Residues 94-103 | MQRIEFPPGT |
| | L3 | of SEQ ID | |
| | | NO.: 29 | |
| AE11-7 VH | | 30 | EVQLVQSGAEVKKPGASVKVSCKTSGYSLT |
| | | | QYPIHWVRQAPGQRPEWMGWISPGNGNTKL |
| | | | SPKFQGRVTLSRDASAGTVFMDLSGLTSDD |
| | | | TAVYFCTSVDLGDHWGQGTLVTVSS |
| AE11-7 VH | CDR- | Residues 31-35 | QYPIH |
| | H1 | of SEQ ID | |
| | | NO.: 30 | |
| AE11-7 VH | CDR- | Residues 50-66 | WISPGNGNTKLSPKFQG |
| | H2 | of SEQ ID | |
| | | NO.: 30 | |
| AE11-7 VH | CDR- | Residues 99-104 | VDLGDH |
| | H3 | of SEQ ID | |
| | | NO.: 30 | |
| AE11-7 VL | | 31 | DIVMTQSPEFQSVTPKEKVTITCRASQSIG |
| | | | SSLHWYQQKPDQSPKLLINYASQSFSGVPS |
| | | | RFSGGGSGTDFTLTINSLEAEDAATYYCHQ |
| | | | SSNLPITFGQGTRLEIK |
| AE11-7 VL | CDR- | Residues 24-34 | RASQSIGSSLH |
| | L1 | of SEQ ID | |
| | | NO.: 31 | |
| AE11-7 VL | CDR- | Residues 50-56 | YASQSFS |
| | L2 | of SEQ ID | |
| | | NO.: 31 | |
| AE11-7 VL | CDR- | Residues 89-97 | HQSSNLPIT |
| | L3 | of SEQ ID | |
| | | NO.: 31 | |
| AE11-13 VH | | 32 | EVQLVESGGGLVQPGRSLRLSCAASGFTFD |
| | | | DYPMHWVRQAPGEGLEWVSGISSNSASIGY |
| | | | ADSVKGRFTISRDNAQNTLYLQMNSLGDED |
| | | | TAVYYCVSLTLGIGQGTLVTVSS |
| AE11-13 VH | CDR- | Residues 31-35 | DYPMH |
| | H1 | of SEQ ID | |
| | | NO.: 32 | |
| AE11-13 VH | CDR- | Residues 50-66 | GISSNSASIGYADSVKG |
| | H2 | of SEQ ID | |
| | | NO.: 32 | |
| AE11-13 VH | CDR- | Residues 99-102 | LTLG |
| | H3 | of SEQ ID | |
| | | NO.: 32 | |
| AE11-13 VL | | 33 | DIRLTQSPSSLSASVGDRVTITCRASQSIG |
| | | | NYLHWYQQKPGKAPKLLIYAASSLQSGVPS |
| | | | RFSGSGSGTDFTLTISSLQPEDFATYYCQQ |
| | | | SYSTLYSFGQGTKLEIK |
| AE11-13 VL | CDR- | Residues 24-34 | RASQSIGNYLH |
| | L1 | of SEQ ID | |
| | | NO.: 33 | |
| AE11-13 VL | CDR- | Residues 50-56 | AASSLQS |
| | L2 | of SEQ ID | |
| | | NO.: 33 | |
| AE11-13 VL | CDR- | Residues 89-97 | QQSYSTLYS |
| | L3 | of SEQ ID | |
| | | NO.: 33 | |

### 1.2: Affinity Maturation of the Fully Human Anti-Human TNF Antibody AE11-5

[0099] The AE11-5 human antibody to human TNF was affinity matured by in vitro display technology. One light chain library was constructed to contain limited mutagenesis at the following residues: 28, 31, 32, 51, 55, 91, 92, 93, 95a and 96 (Kabat numbering). This library also contained framework germline back-mutations D1E, M4L, H11Q, R49K, H76N and Q103K as well as toggled residues at position 50(R/K) and 94(S/L) to allow for framework germlining during library selections. Two heavy chain libraries were made to contain limited mutagenesis in CDRH1 and CDRH2 at residues 30, 31, 33, 50, 52, and 55 to 58 (Kabat numbering) or in CDRH3 at residues 95 to 100b. The library containing CDRH1 and CDRH2 diversities also had framework germline back-mutations Al8V and L64Q and toggled residue at 54(L/F) and 78(V/A). The CDRH3 library has an additional toggled residue at 100c(A/F).

[0100] All three libraries were selected separately for the ability to bind human or cynomolgus monkey TNF in the presence of decreasing concentrations of biotinylated human or cynomolgus monkey TNF antigens. All mutated CDR sequences recovered from library selections were recombined into additional libraries and the recombined libraries were subjected to more stringent selection conditions before individual antibodies are identified.

[0101] Table 11 provides a list of amino acid sequences of VH regions of affinity matured fully human TNF antibodies derived from AE11-5. Amino acid residues of individual CDRs of each VH sequence are indicated in bold.

TABLE 11
List of amino acid sequences of affinity
matured AE11-5 VH variants

| Clone | SEQ ID NO: | VH |
|---|---|---|
| J685M2S2-10VH | 94 | EVQLVQSGAEVKKPGSSVKVSCKASGGTFSWYA |
| | | ISWVRQAPGQGLEWMGGITPILGSANYAQKFQG |
| | | RVTITADESTSTAYMELSSLRSEDTAVYYCARG |
| | | LYYDPTRADYWGQGTLVTVSS |
| J685M2S2-12VH | 95 | EVQLVQSGAEVKKPGSSVKVSCKASGGTFSYYS |
| | | ISWVRQAPGQGLEWMGGIMPILGTANYAQKFQG |
| | | RVTITADESTSTAYMELSSLRSEDTAVYYCARG |
| | | LYYDPTRADYWGQGTLVTVSS |
| J685M2S2-13VH | 96 | EVQLVQSGAEVKKPGSSVKVSCKASGGTFSWYA |
| | | ISWVRQAPGQGLEWMGGIIPILGSPIYAQKFQG |
| | | RVTITADESTSTAYMELSSLRSEDTAVYYCARG |
| | | LYYDPTRADYWGQGTLVTVSS |
| J685M2S2-14VH | 97 | EVQLVQSGAEVKKPGSSVKVSCKASGGTFSWYT |
| | | ISWVRQAPGQGLEWMGGIIPILGSPIYAQKFQG |
| | | RVTITADESTSTAYMELSSLRSEDTAVYYCARG |
| | | LYYDPTRADYWGQGTLVTVSS |
| J685M2S2-16VH | 98 | EVQLVQSGAEVKKPGSSVKVSCKASGGTFAWYS |
| | | ISWVRQAPGQGLEWMGGITPILGTANYAQKFQG |
| | | RVTITADESTSTAYMELSSLRSEDTAVYYCARG |
| | | LYYDPTRADYWGQGTLVTVSS |
| J685M2S2-18VH | 99 | EVQLVQSGAEVKKPGSSVKVSCKASGGTFSFYA |
| | | ISWVRQAPGQGLEWMGGITPILGAATYAQKFQG |
| | | RVTITADESTSTAYMELSSLRSEDTAVYYCARG |
| | | LYYDPTRADYWGQGTLVTVSS |
| J685M2S2-1VH | 100 | EVQLVQSGAEVKKPGSSVKVSCKASGGTFSIYA |
| | | ISWVRQAPGQGLEWMGGITPILGAAVYAQKFQG |
| | | RVTITADESTSTAYMELSSLRSEDTAVYYCARG |
| | | LYYDPTRADYWGQGTLVTVSS |
| J685M2S2-21VH | 101 | EVQLVQSGAEVKKPGSSVKVSCKASGGTFSWYT |
| | | ISWVRQAPGQGLEWMGGIMPILGTANYAQKFQG |
| | | RVTITADESTSTAYMELSSLRSEDTAVYYCARG |
| | | LYYDPTRADYWGQGTLVTVSS |
| J685M2S2-23VH | 102 | EVQLVQSGAEVKKPGSSVKVSCKASGGTFSWYA |
| | | ISWVRQAPGQGLEWMGGITPILGVAVYAQKFQG |
| | | RVTITADESTSTAYMELSSLRSEDTAVYYCARG |
| | | LYYDPTRADYWGQGTLVTVSS |
| J685M2S2-25VH | 103 | EVQLVQSGAEVKKPGSSVKVSCKASGGTFSWYA |
| | | ISWVRQAPGQGLEWMGGITPILGTANYAQKFQG |
| | | RVTITADESTSTAYMELSSLRSEDTAVYYCARG |
| | | LYYDPTRADYWGQGTLVTVSS |
| J685M2S2-27VH | 104 | EVQLVQSGAEVKKPGSSVKVSCKASGGTFSWYA |
| | | ISWVRQAPGQGLEWMGGITPILGSAHYAQKFQG |
| | | RVTITADESTSTAYMELSSLRSEDTAVYYCARG |
| | | LYYDPTRADYWGQGTLVTVSS |
| J685M2S2-28VH | 105 | EVQLVQSGAEVKKPGSSVKVSCKASGGTFSWYA |
| | | ISWVRQAPGQGLEWMGGITPILGSAIYAQKFQG |
| | | RVTITADESTSTVYMELSSLRSEDTAVYYCARG |
| | | LYYDPTRADYWGQGTLVTVSS |
| J685M2S2-29VH | 106 | EVQLVQSGAEVKKPGSSVKVSCKASGGTFSWYA |
| | | ISWVRQAPGQGLEWMGGITPILGTAIYAQKFQG |
| | | RVTITADESTSTVYMELSSLRSEDTAVYYCARG |
| | | LYYDPTRADYWGQGTLVTVSS |
| J685M2S2-31VH | 107 | EVQLVQSGAEVKKPGSSVKVSCKASGGTFSIYT |
| | | ISWVRQAPGQGLEWMGGIIPILRNPIYAQKFQG |
| | | RVTITADESTSTAYMELSSLRSEDTAVYYCARG |
| | | LYYDPTRADYWGQGTLVTVSS |
| J685M2S2-32VH | 108 | EVQLVQSGAEVKKPGSSVKVSCKASGGTFSYYA |
| | | ISWVRQAPGQGLEWMGGIMPILGTPTYAQKFQG |
| | | RVTITADESTSTAYMELSSLRSEDTAVYYCARG |
| | | LYYDPTRADYWGQGTLVTVSS |
| J685M2S2-35VH | 109 | EVQLVQSGAEVKKPGSSVKVSCKASGGTFSIYT |
| | | ISWVRQAPGQGLEWMGGIIPILGAPIYAQKFQG |
| | | RVTITADESTSTAYMELSSLRSEDTAVYYCARG |
| | | LYYDPTRADYWGQGTLVTVSS |
| J685M2S2-37VH | 110 | EVQLVQSGAEVKKPGSSVKVSCKASGGTFSWYA |
| | | ISWVRQAPGQGLEWMGGITPILGSATYAQKFQG |
| | | RVTITADESTSTAYMELSSLRSEDTAVYYCARG |
| | | LYYDPTRADYWGQGTLVTVSS |
| J685M2S2-38VH | 111 | EVQLVQSGAEVKKPGSSVKVSCKASGGTFSWYS |
| | | ISWVRQAPGQGLEWMGGIMPILGSASYAQKFQG |
| | | RVTITADESTSTAYMELSSLRSEDTAVYYCARG |
| | | LYYDPTRADYWGQGTLVTVSS |
| J685M2S2-43VH | 112 | EVQLVQSGAEVKKPGSSVKVSCKASGGTFSWYT |
| | | ISWVRQAPGQGLEWMGGIMPILGTASYAQKFQG |
| | | RVTITADESTSTAYMELSSLRSEDTAVYYCARG |
| | | LYYDPTRADYWGQGTLVTVSS |
| J685M2S2-44VH | 113 | EVQLVQSGAEVKKPGSSVKVSCKASGGTFSWYS |
| | | ISWVRQAPGQGLEWMGGITPILGTANYAQKFQG |
| | | RVTITADESTSTAYMELSSLRSEDTAVYYCARG |
| | | LYYDPTRADYWGQGTLVTVSS |
| J685M2S2-45VH | 114 | EVQLVQSGAEVKKPGSSVKVSCKASGGTFSWYA |
| | | ISWVRQAPGQGLEWMGGIMPILGTATYAQKFQG |
| | | RVTITADESTSTAYMELSSLRSEDTAVYYCARG |
| | | LYYDPTRADYWGQGTLVTVSS |
| J685M2S2-46VH | 115 | EVQLVQSGAEVKKPGSSVKVSCKASGGTFSFYT |
| | | ISWVRQAPGQGLEWMGGIMPILGSPHYAQKFQG |
| | | RVTITADESTSTAYMELSSLRSEDTAVYYCARG |
| | | LYYDPTRADYWGQGTLVTVSS |
| J685M2S2-47VH | 116 | EVQLVQSGAEVKKPGSSVKVSCKASGGTFSWYA |
| | | ISWVRQAPGQGLEWMGGITPILGTANYAQKFQG |
| | | RVTITADESTSTVYMELSSLRSEDTAVYYCARG |
| | | LYYDPTRADYWGQGTLVTVSS |
| J685M2S2-48VH | 117 | EVQLVQSGAEVKKPGSSVKVSCKASGGTFSWYA |
| | | ISWVRQAPGQGLEWMGGIMPILGSATYAQKFQG |
| | | RVTITADESTSTAYMELSSLRSEDTAVYYCARG |
| | | LYYDPTRADYWGQGTLVTVSS |
| J685M2S2-4VH | 118 | EVQLVQSGAEVKKPGSSVKVSCKASGGTFSWYA |
| | | ISWVRQAPGQGLEWMGGIIPILGTPTYAQKFQG |
| | | RVTITADESTSTAYMELSSLRSEDTAVYYCARG |
| | | LYYDPTRADYWGQGTLVTVSS |
| J685M2S2-50VH | 119 | EVQLVQSGAEVKKPGSSVKVSCKASGGTFSSYA |
| | | ISWVRQAPGQGLEWMGGIIPILGTANYAQKFQG |
| | | RVTITADESTSTVYMELSSLRSEDTAVYYCARG |
| | | VYYDPKRADYWGQGTLVTVSS |
| J685M2S2-51VH | 120 | EVQLVQSGAEVKKPGSSVKVSCKASGGTFSLYT |
| | | ISWVRQAPGQGLEWMGGIMPILGAPRYAQKFQG |
| | | RVTITADESTSTAYMELSSLRSEDTAVYYCARG |
| | | LYYDPTRADYWGQGTLVTVSS |
| J685M2S2-52VH | 121 | EVQLVQSGAEVKKPGSSVKVSCKASGGTFSYYA |
| | | ISWVRQAPGQGLEWMGGIMPILGSPIYAQKFQG |
| | | RVTITADESTSTVYMELSSLRSEDTAVYYCARG |
| | | LYYDPTRADYWGQGTLVTVSS |
| J685M2S2-53VH | 122 | EVQLVQSGAEVKKPGSSVKVSCKASGGTFSIYA |
| | | ISWVRQAPGQGLEWMGGILPILGSPIYAQKFQG |
| | | RVTITADESTSTAYMELSSLRSEDTAVYYCARG |
| | | LYYDPTRADYWGQGTLVTVSS |
| J685M2S2-55VH | 123 | EVQLVQSGAEVKKPGSSVKVSCKASGGTFSIYA |
| | | ISWVRQAPGQGLEWMGGIIPILGSPIYAQKFQG |
| | | RVTITADESTSTAYMELSSLRSEDTAVYYCARG |
| | | LYYDPTRADYWGQGTLVTVSS |
| J685M2S2-56VH | 124 | EVQLVQSGAEVKKPGSSVKVSCKASGGTFSWYA |
| | | ISWVRQAPGQGLEWMGGIVPILGAPLYAQKFQG |
| | | RVTITADESTSTAYMELSSLRSEDTAVYYCARG |
| | | LYYDPTRADYWGQGTLVTVSS |
| J685M2S2-58VH | 125 | EVQLVQSGAEVKKPGSSVKVSCKASGGTFSIYA |
| | | ISWVRQAPGQGLEWMGGIMPILGAPIYAQKFQG |
| | | RVTITADESTSTAYMELSSLRSEDTAVYYCARG |
| | | LYYDPTRADYWGQGTLVTVSS |
| J685M2S2-5VH | 126 | EVQLVQSGAEVKKPGSSVKVSCKASGGTFSYYT |
| | | ISWVRQAPGQGLEWMGGIMPILGTPAYAQKFQG |
| | | RVTITADESTSTAYMELSSLRSEDTAVYYCARG |
| | | LYYDPTRADYWGQGTLVTVSS |
| J685M2S2-61VH | 127 | EVQLVQSGAEVKKPGSSVKVSCKASGGTFSWYS |
| | | ISWVRQAPGQGLEWMGGITPILGAATYAQKFQG |
| | | RVTITADESTSTAYMELSSLRSEDTAVYYCARG |
| | | LYYDPTRADYWGQGTLVTVSS |
| J685M2S2-62VH | 128 | EVQLVQSGAEVKKPGSSVKVSCKASGGTFSWYA |
| | | ISWVRQAPGQGLEWMGGIIPILGTPTYAQKFQG |
| | | RVTITADESTSTVYMELSSLRSEDTAVYYCARG |
| | | LYYDPTRADYWGQGTLVTVSS |
| J685M2S2-63VH | 129 | EVQLVQSGAEVKKPGSSVKVSCKASGGTFSWYA |
| | | ISWVRQAPGQGLEWMGGIIPILGTPIYAQKFQG |
| | | RVTITADESTSTAYMELSSLRSEDTAVYYCARG |
| | | LYYDPTRADYWGQGTLVTVSS |
| J685M2S2-64VH | 130 | EVQLVQSGAEVKKPGSSVKVSCKASGGTFSWYA |
| | | ISWVRQAPGQGLEWMGGITPILGIGNYAQKFQG |
| | | RVTITADESTSTAYMELSSLRSEDTAVYYCARG |
| | | LYYDPTRADYWGQGTLVTVSS |
| J685M2S2-66VH | 131 | EVQLVQSGAEVKKPGSSVKVSCKASGGTFSIYA |
| | | ISWVRQAPGQGLEWMGGIVPILGAATYAQKFQG |
| | | RVTITADESTSTAYMELSSLRSEDTAVYYCARG |
| | | LYYDPTRADYWGQGTLVTVSS |
| J685M2S2-67VH | 132 | EVQLVQSGAEVKKPGSSVKVSCKASGGTFSWYA |
| | | ISWVRQAPGQGLEWMGGITPILGSSTYAQKFQG |
| | | RVTITADESTSTAYMELSSLRSEDTAVYYCARG |
| | | LYYDPTRADYWGQGTLVTVSS |
| J685M2S2-68VH | 133 | EVQLVQSGAEVKKPGSSVKVSCKASGGTFSWYT |
| | | ISWVRQAPGQGLEWMGGIMPILGTANYAQKFQG |
| | | RVTITADESTSTAYMELSSLRSEDTAVYYCARG |
| | | LYYDPTRADYWGQGTLVTVSS |
| J685M2S2-6VH | 134 | EVQLVQSGAEVKKPGSSVKVSCKASGGTFSWYA |
| | | ISWVRQAPGQGLEWMGGITPILGNSIYAQKFQG |
| | | RVTITADESTSTAYMELSSLRSEDTAVYYCARG |
| | | LYYDPTRADYWGQGTLVTVSS |
| J685M2S2-70VH | 135 | EVQLVQSGAEVKKPGSSVKVSCKASGGTFSWYA |
| | | ISWVRQAPGQGLEWMGGITPILGSPIYAQKFQG |
| | | RVTITADESTSTAYMELSSLRSEDTAVYYCARG |
| | | LYYDPTRADYWGQGTLVTVSS |
| J685M2S2-71VH | 136 | EVQLVQSGAEVKKPGSSVKVSCKASGGTFSWYA |
| | | ISWVRQAPGQGLEWMGGIMPILGTPTYAQKFQG |
| | | RVTITADESTSTAYMELSSLRSEDTAVYYCARG |
| | | LYYDPTRADYWGQGTLVTVSS |
| J685M2S2-72VH | 137 | EVQLVQSGAEVKKPGSSVKVSCKASGGTFSYYA |
| | | ISWVRQAPGQGLEWMGGITPILGAANYAQKFQG |
| | | RVTITADESTSTVYMELSSLRSEDTAVYYCARG |
| | | LYYDPTRADYWGQGTLVTVSS |
| J685M2S2-73VH | 138 | EVQLVQSGAEVKKPGSSVKVSCKASGGTFSWYA |
| | | ISWVRQAPGQGLEWMGGITPILGAAIYAQKFQG |
| | | RVTITADESTSTAYMELSSLRSEDTAVYYCARG |
| | | LYYDPTRADYWGQGTLVTVSS |
| J685M2S2-75VH | 139 | EVQLVQSGAEVKKPGSSVKVSCKASGGTFSWYA |
| | | ISWVRQAPGQGLEWMGGITPILGTATYAQKFQG |
| | | RVTITADESTSTAYMELSSLRSEDTAVYYCARG |
| | | LYYDPTRADYWGQGTLVTVSS |
| J685M2S2-76VH | 140 | EVQLVQSGAEVKKPGSSVKVSCKASGGTFSWYS |
| | | ISWVRQAPGQGLEWMGGITPILGSAHYAQKFQG |
| | | RVTITADESTSTAYMELSSLRSEDTAVYYCARG |
| | | LYYDPTRADYWGQGTLVTVSS |
| J685M2S2-77VH | 141 | EVQLVQSGAEVKKPGSSVKVSCKASGGTFSWYA |
| | | ISWVRQAPGQGLEWMGGITPILGNAIYAQKFQG |
| | | RVTITADESTSTAYMELSSLRSEDTAVYYCARG |
| | | LYYDPTRADYWGQGTLVTVSS |
| J685M2S2-78VH | 142 | EVQLVQSGAEVKKPGSSVKVSCKASGGTFSWYA |
| | | ISWVRQAPGQGLEWMGGITPILRSAVYAQKFQG |
| | | RVTITADESTSTVYMELSSLRSEDTAVYYCARG |
| | | LYYDPTRADYWGQGTLVTVSS |
| J685M2S2-7VH | 143 | EVQLVQSGAEVKKPGSSVKVSCKASGGTFSWYS |
| | | ISWVRQAPGQGLEWMGGIMPILGTANYAQKFQG |
| | | RVTITADESTSTAYMELSSLRSEDTAVYYCARG |
| | | LYYDPTRADYWGQGTLVTVSS |
| J685M2S2-80VH | 144 | EVQLVQSGAEVKKPGSSVKVSCKASGGTFSWYA |
| | | ISWVRQAPGQGLEWMGGITPILGTASYAQKFQG |
| | | RVTITADESTSTAYMELSSLRSEDTAVYYCARG |
| | | LYYDPTRADYWGQGTLVTVSS |
| J685M2S2-81VH | 145 | EVQLVQSGAEVKKPGSSVKVSCKASGGTFSWYA |
| | | ISWVRQAPGQGLEWMGGITPILGTAIYAQKFQG |
| | | RVTITADESTSTAYMELSSLRSEDTAVYYCARG |
| | | LYYDPTRADYWGQGTLVTVSS |
| J685M2S2-82VH | 146 | EVQLVQSGAEVKKPGSSVKVSCKASGGTFSWYA |
| | | ISWVRQAPGQGLEWMGGITPILGSPAYAQKFQG |
| | | RVTITADESTSTAYMELSSLRSEDTAVYYCARG |
| | | LYYDPTRADYWGQGTLVTVSS |
| J685M2S2-83VH | 147 | EVQLVQSGAEVKKPGSSVKVSCKASGGTFSRYA |
| | | ISWVRQAPGQGLEWMGGIIPILGPASYAQKFQG |
| | | RVTITADESTSTAYMELSSLRSEDTAVYYCARG |
| | | LYYDPTRADYWGQGTLVTVSS |
| J685M2S2-84VH | 148 | EVQLVQSGAEVKKPGSSVKVSCKASGGTFSWYA |
| | | ISWVRQAPGQGLEWMGGITPILDAAIYAQKFQG |
| | | RVTITADESTSTAYMELSSLRSEDTAVYYCARG |
| | | LYYDPTRADYWGQGTLVTVSS |
| J685M2S2-86VH | 149 | EVQLVQSGAEVKKPGSSVKVSCKASGGTFSWYT |
| | | ISWVRQAPGQGLEWMGGIMPILGIPNYAQKFQG |
| | | RVTITADESTSTAYMELSSLRSEDTAVYYCARG |
| | | LYYDPTRADYWGQGTLVTVSS |
| J685M2S2-87VH | 150 | EVQLVQSGAEVKKPGSSVKVSCKASGGTFSIYA |
| | | ISWVRQAPGQGLEWMGGITPILGSAIYAQKFQG |
| | | RVTITADESTSTAYMELSSLRSEDTAVYYCARG |
| | | LYYDPTRADYWGQGTLVTVSS |
| J685M2S2-88VH | 151 | EVQLVQSGAEVKKPGSSVKVSCKASGGTFSYYA |
| | | ISWVRQAPGQGLEWMGGIMPILGTATYAQKFQG |
| | | RVTITADESTSTVYMELSSLRSEDTAVYYCARG |
| | | LYYDPTRADYWGQGTLVTVSS |
| J685M2S2-89VH | 152 | EVQLVQSGAEVKKPGSSVKVSCKASGGTFSSYA |
| | | ISWVRQAPGQGLEWMGGIIPILGTANYAQKFQG |
| | | RVTITADESTSTVYMELSSLRSEDTAVYYCARG |
| | | VYFDPKRADYWGQGTLVTVSS |
| J685M2S2-8VH | 153 | EVQLVQSGAEVKKPGSSVKVSCKASGGTFNWYT |
| | | ISWVRQAPGQGLEWMGGIMPILGTANYAQKFQG |
| | | RVTITADESTSTAYMELSSLRSEDTAVYYCARG |
| | | LYYDPTRADYWGQGTLVTVSS |
| J685M2S2-90VH | 154 | EVQLVQSGAEVKKPGSSVKVSCKASGGTFSSYA |
| | | ISWVRQAPGQGLEWMGGIIPILGTANYAQKFQG |
| | | RVTITADESTSTVYMELSSLRSEDTAVYYCARG |
| | | VYFDFTRADYWGQGTLVTVSS |
| J685M2S2-91VH | 155 | EVQLVQSGAEVKKPGSSVKVSCKASGGTFSWYA |
| | | ISWVRQAPGQGLEWMGGIIPILRFPTYAQKFQG |
| | | RVTITADESTSTVYMELSSLRSEDTAVYYCARG |
| | | LYYDPTRADYWGQGTLVTVSS |
| J685M2S2-92VH | 156 | EVQLVQSGAEVKKPGSSVKVSCKVSGGTFSWYS |
| | | ISWVRQAPGQGLEWMGGILPILDTANYAQKFQG |
| | | RVTITADESTSTAYMELSSLRSEDTAVYYCARG |
| | | LYYDPTRADYWGQGTLVTVSS |
| J685M2S2-93VH | 157 | EVQLVQSGAEVKKPGSSVKVSCKASGGTFSWYA |
| | | ISWVRQAPGQGLEWMGGIMPILGTAVYAQKFQG |
| | | RVTITADESTSTAYMELSSLRSEDTAVYYCARG |
| | | LYYDPTRADYWGQGTLVTVSS |
| J685M2S2-94VH | 158 | EVQLVQSGAEVKKPGSSVKVSCKASGGTFSIYS |
| | | ISWVRQAPGQGLEWMGGILPILGTANYAQKFQG |
| | | RVTITADESTSTVYMELSSLRSEDTAVYYCARG |
| | | LYYDPTRADYWGQGTLVTVSS |
| J688M2-11VH | 159 | EVQLVQSGAEVKKPGSSVKVSCKASGGTFSSYA |
| | | ISWVRQAPGQGLEWMGGIIPILGTANYAQKFQG |
| | | RVTITADESTSTVYMELSSLRSEDTAVYYCARG |
| | | VYYDPTRADYWGQGTLVTVSS |
| J688M2-13VH | 160 | EVQLVQSGAEVKKPGSSVKVSCKASGGTFSSYA |
| | | ISWVRQAPGQGLEWMGGIIPILGTANYAQKFQG |
| | | RVTITADESTSTVYMELSSLRSEDTAVYYCARG |
| | | LYYDPSRADYWGQGTLVTVSS |
| J688M2-14VH | 161 | EVQLVQSGAEVKKPGSSVKVSCKASGGTFSSYA |
| | | ISWVRQAPGQGLEWMGGIIPILGTANYAQKFQG |
| | | RVTITADESTSTVYMELSSLRSEDTAVYYCARG |
| | | VYFNPTRADYWGQGTLVTVSS |
| J688M2-16VH | 162 | EVQLVQSGAEVKKPGSSVKVSCKASGGTFSSYA |
| | | ISWVRQAPGQGLEWMGGIIPILGTANYAQKFQG |
| | | RVTITADESTSTVYMELSSLRSEDTAVYYCARG |
| | | LYYDPARFDYWGQGTLVTVSS |
| J688M2-20VH | 163 | EVQLVQSGAEVKKPGSSVKVSCKASGGTFSSYA |
| | | ISWVRQAPGQGLEWMGGIIPILGTANYAQKFQG |
| | | RVTITADESTSTVYMELSSLRSEDTAVYYCARG |
| | | LYYNPSRADYWGQGTLVTVSS |
| J688M2-21VH | 164 | EVQLVQSGAEVKKPGSSVKVSCKASGGTFSSYA |
| | | ISWVRQAPGQGLEWMGGIIPILGTANYAQKFQG |
| | | RVTITADESTSTVYMELSSLRSEDTAVYYCARG |
| | | LYYDPKRADYWGQGTLVTVSS |
| J688M2-22VH | 165 | EVQLVQSGAEVKKPGSSVKVSCKASGGTFSSYA |
| | | ISWVRQAPGQGLEWMGGIIPILGTANYAQKFQG |
| | | RVTITADESTSTVYMELSSLRSEDTAVYYCARG |
| | | LYYDPRRADYWGQGTLVTVSS |
| J688M2-28VH | 166 | EVQLVQSGAEVKKPGSSVKVSCKASGGTFSSYA |
| | | ISWVRQAPGQGLEWMGGIIPILGTANYAQKFQG |
| | | RVTITADESTSTVYMELSSLRSEDTAVYYCARG |
| | | FYYDPTRADYWGQGTLVTVSS |
| J688M2-29VH | 167 | EVQLVQSGAEVKKPGSSVKVSCKASGGTFSSYA |
| | | ISWVRQAPGQGLEWMGGIIPILGTANYAQKFQG |
| | | RVTITADESTSTVYMELSSLRSEDTAVYYCARG |
| | | LYYDFTRADYWGQGTLVTVSS |
| J688M2-2VH | 168 | EVQLVQSGAEVKKPGSSVKVSCKASGGTFSSYA |
| | | ISWVRQAPGQGLEWMGGIIPILGTANYAQKFQG |
| | | RVTITADESTSTVYMELSSLRSEDTAVYYCARG |
| | | LYFDPKRADYWGQGTLVTVSS |
| J688M2-37VH | 169 | EVQLVQSGAEVKKPGSSVKVSCKASGGTFSSYA |
| | | ISWVRQAPGQGLEWMGGIIPILGTANYAQKFQG |
| | | RVTITADESTSTVYMELSSLRSEDTAVYYCARG |
| | | VYFDPTRADYWGQGTLVTVSS |
| J688M2-3VH | 170 | EVQLVQSGAEVKKPGSSVKVSCKASGGTFSSYA |
| | | ISWVRQAPGQGLEWMGGIIPILGTANYAQKFQG |
| | | RVTITADESTSTVYMELSSLRSEDTAVYYCARG |
| | | IYYDPSRADYWGQGTLVTVSS |
| J688M2-46VH | 171 | EVQLVQSGAEVKKPGSSVKVSCKASGGTFSSYA |
| | | ISWVRQAPGQGLEWMGGIIPILGTANYAQKFQG |
| | | RVTITADESTSTVYMELSSLRSEDTAVYYCARS |
| | | LYYERTRADYWGQGTLVTVSS |
| J688M2-48VH | 172 | EVQLVQSGAEVKKPGSSVKVSCKASGGTFSSYA |
| | | ISWVRQAPGQGLEWMGGIIPILGTANYAQKFQG |
| | | RVTITADESTSTVYMELSSLRSEDTAVYYCARW |
| | | RFYIPIRFDYWGQGTLVTVSS |
| J688M2-4VH | 173 | EVQLVQSGAEVKKPGSSVKVSCKASGGTFSSYA |
| | | ISWVRQAPGQGLEWMGGIIPILGTANYAQKFQG |
| | | RVTITADESTSTVYMELSSLRSEDTAVYYCARG |
| | | VYYDFTRADYWGQGTLVTVSS |
| J688M2-50VH | 174 | EVQLVQSGAEVKKPGSSVKVSCKASGGTFSSYA |
| | | ISWVRQAPGQGLEWMGGIIPILGTANYAQKFQG |
| | | RVTITADESTSTVYMELSSLRSEDTAVYYCARG |
| | | LFYDPSRADYWGQGTLVTVSS |
| J688M2-52VH | 175 | EVQLVQSGAEVKKPGSSVKVSCKASGGTFSSYA |
| | | ISWVRQAPGQGLEWMGGIIPILGTANYAQKFQG |
| | | RVTITADESTSTVYMELSSLRSEDTAVYYCARG |
| | | VYYDPVRADYWGQGTLVTVSS |
| J688M2-56VH | 176 | EVQLVQSGAEVKKPGSSVKVSCKASGGTFSSYA |
| | | ISWVRQAPGQGLEWMGGIIPILGTANYAQKFQG |
| | | RVTITADESTSTVYMELSSLRSEDTAVYYCARG |
| | | VYYDPIRADYWGQGTLVTVSS |
| J688M2-57VH | 177 | EVQLVQSGAEVKKPGSSVKVSCKASGGTFSSYA |
| | | ISWVRQAPGQGLEWMGGIIPILGTANYAQKFQG |
| | | RVTITADESTSTVYMELSSLRSEDTAVYYCARG |
| | | IYYDPKRADYWGQGTLVTVSS |
| J688M2-58VH | 178 | EVQLVQSGAEVKKPGSSVKVSCKASGGTFSSYA |
| | | ISWVRQAPGQGLEWMGGIIPILGTANYAQKFQG |
| | | RVTITADESTSTVYMELSSLRSEDTAVYYCARG |
| | | LYYNPIRFDYWGQGTLVTVSS |
| J688M2-64VH | 179 | EVQLVQSGAEVKKPGSSVKVSCKASGGTFSSYA |
| | | ISWVRQAPGQGLEWMGGIIPILGTANYAQKFQG |
| | | RVTITADESTSTVYMELSSLRSEDTAVYYCARG |
| | | VYFDPARADYWGQGTLVTVSS |
| J688M2-65VH | 180 | EVQLVQSGAEVKKPGSSVKVSCKASGGTFSSYA |
| | | ISWVRQAPGQGLEWMGGIIPILGTANYAQKFQG |
| | | RVTITADESTSTVYMELSSLRSEDTAVYYCARG |
| | | VFFDPTRADYWGQGTLVTVSS |
| J688M2-68VH | 181 | EVQLVQSGAEVKKPGSSVKVSCKASGGTFSSYA |
| | | ISWVRQAPGQGLEWMGGIIPILGTANYAQKFQG |
| | | RVTITADESTSTVYMELSSLRSEDTAVYYCARG |
| | | VFYNPTRADYWGQGTLVTVSS |
| J688M2-69VH | 182 | EVQLVQSGAEVKKPGSSVKVSCKASGGTFSSYA |
| | | ISWVRQAPGQGLEWMGGIIPILGTANYAQKFQG |
| | | RVTITADESTSTVYMELSSLRSEDTAVYYCARG |
| | | LYYEGPSADYWGQGTLVTVSS |
| J688M2-6VH | 183 | EVQLVQSGAEVKKPGSSVKVSCKASGGTFSSYA |
| | | ISWVRQAPGQGLEWMGGIIPILGTANYAQKFQG |
| | | RVTITADESTSTVYMELSSLRSEDTAVYYCARG |
| | | LYYAPNRADYWGQGTLVTVSS |
| J688M2-73VH | 184 | EVQLVQSGAEVKKPGSSVKVSCKASGGTFSSYA |
| | | ISWVRQAPGQGLEWMGGIIPILGTANYAQKFQG |
| | | RVTITADESTSTVYMELSSLRSEDTAVYYCARG |
| | | LFYDPTRADYWGQGTLVTVSS |
| J688M2-74VH | 185 | EVQLVQSGAEVKKPGSSVKVSCKASGGTFSSYA |
| | | ISWVRQAPGQGLEWMGGIIPILGTANYAQKFQG |
| | | RVTITADESTSTVYMELSSLRSEDTAVYYCARG |
| | | VYYNPTRADYWGQGTLVTVSS |
| J688M2-75VH | 186 | EVQLVQSGAEVKKPGSSVKVSCKASGGTFSSYA |
| | | ISWVRQAPGQGLEWMGGIIPILGTANYAQKFQG |
| | | RVTITADESTSTVYMELSSLRSEDTAVYYCARG |
| | | VYYDPARADYWGQGTLVTVSS |
| J688M2-7VH | 187 | EVQLVQSGAEVKKSGSSVKVSCKASGGTFSSYA |
| | | ISWVRQAPGQGLEWMGGIIPILGTANYAQKFQG |
| | | RVTITADESTSTVYMELSSLRSEDTAVYYCARG |
| | | VYYDPGRADYWGQGTLVTVSS |
| J688M2-81VH | 188 | EVQLVQSGAEVKKPGSSVKVSCKASGGTFSSYA |
| | | ISWVRQAPGQGLEWMGGIIPILGTANYAQKFQG |
| | | RVTITADESTSTVYMELSSLRSEDTAVYYCARG |
| | | VYFDPSRADYWGQGTLVTVSS |
| J688M2-82VH | 189 | EVQLVQSGAEVKKPGSSVKVSCKASGGTFSSYA |
| | | ISWVRQAPGQGLEWMGGIIPILGTANYAQKFQG |
| | | RVTITADESTSTVYMELSSLRSEDTAVYYCARG |
| | | LYFDPSRFDYWGQGTLVTVSS |
| J688M2-83VH | 190 | EVQLVQSGAEVKKPGSSVKVSCKASGGTFSSYA |
| | | ISWVRQAPGQGLEWMGGIIPILGTANYAQKFQG |
| | | RVTITADESTSTVYMELSSLRSEDTAVYYCARG |
| | | LYFDFTRADYWGQGTLVTVSS |
| J688M2-84VH | 191 | EVQLVQSGAEVKKPGSSVKVSCKASGGTFSSYA |
| | | ISWVRQAPGQGLEWMGGIIPILGTANYAQKFQG |
| | | RVTITADESTSTVYMELSSLRSEDTAVYYCARG |
| | | IYYDPTRADYWGQGTLVTVSS |
| J688M2-88VH | 192 | EVQLVQSGAEVKKPGSSVKVSCKASGGTFSSYA |
| | | ISWVRQAPGQGLEWMGGIIPILGTANYAQKFQG |
| | | RVTITADESTSTVYMELSSLRSEDTAVYYCARG |
| | | LYFDPSRADYWGQGTLVTVSS |
| J688M2-89VH | 193 | EVQLVQSGAEVKKPGSSVKVSCKASGGTFSSYA |
| | | ISWVRQAPGQGLEWMGGIIPILGTANYAQKFQG |
| | | RVTITADESTSTVYMELSSLRSEDTAVYYCARG |
| | | VYYDPSRFDYWGQGTLVTVSS |
| J688M2-8VH | 194 | EVQLVQSGAEVKKPGSSVKVSCKASGGTFSSYA |
| | | ISWVRQAPGQGLEWMGGIIPILGTANYAQKFQG |
| | | RVTITADESTSTVYMELSSLRSEDTAVYYCARG |
| | | QYYDTSRADYWGQGTLVTVSS |
| J688M2-90VH | 195 | EVQLVQSGAEVKKPGSSVKVSCKASGGTFSSYA |
| | | ISWVRQAPGQGLEWMGGIIPILGTANYAQKFQG |
| | | RVTITADESTSTVYMELSSLRSEDTAVYYCARS |
| | | LYYDTTRFDYWGQGTLVTVSS |
| J688M2-92VH | 196 | EVQLVQSGAEVKKPGSSVKVSCKASGGTFSSYA |
| | | ISWVRQAPGQGLEWMGGIIPILGTANYAQKFQG |
| | | RVTITADESTSTVYMELSSLRSEDTAVYYCARG |
| | | VFYDPTRADYWGQGTLVTVSS |
| J688M2-94VH | 197 | EVQLVQSGAEVKKPGSSVKVSCKASGGTFSSYA |
| | | ISWVRQAPGQGLEWMGGIIPILGTANYAQKFQG |
| | | RVTITADESTSTVYMELSSLRSEDTAVYYCARG |
| | | IYYDPARADYWGQGTLVTVSS |
| J688M2-95VH | 198 | EVQLVQSGAEVKKPGSSVKVSCKASGGTFSSYA |
| | | ISWVRQAPGQGLEWMGGIIPILGTANYAQKFQG |
| | | RVTITADESTSTVYMELSSLRSEDTAVYYCARG |
| | | LFYDPRRADYWGQGTLVTVSS |
| J688M2-96VH | 199 | EVQLVQSGAEVKKPGSSVKVSCKASGGTFSSYA |
| | | ISWVRQAPGQGLEWMGGIIPILGTANYAQKFQG |
| | | RVTITADESTSTVYMELSSLRSEDTAVYYCARG |
| | | VYYDTTRADYWGQGTLVTVSS |
| J693FRM2S2L- | 200 | EVQLVQSGAEVKKPGSSVKVSCKASGGTFSSYA |
| 32VH | | ISWVRQAPGQGLEWMGGIIPILGTANYAQKFQG |
| | | RVTITADESTSTVYMELSSLRSEDTAVYYCARG |
| | | LYYDPARADYWGQGTLVTVSS |
| J693FRM2S2L- | 201 | EVQLVQSGAEVKKPGSSVKVSCKASGGTFSSYA |
| 40VH | | ISWVRQAPGQGLEWMGGIIPILGTANYAQKFQG |
| | | RVTITADESTSTVYMELSSLRSEDTAVYYCSRG |
| | | LYYDPTRADYWGQGTLVTVSS |
| J693FRM2S2L- | 202 | EVQLVQSGAEVMKPGSSVKVSCKASGGTFSSYA |
| 70VH | | ISWVRQAPGQGLEWMGGIIPILGTANYAQKFQG |
| | | RVTITADESTSTVYMELSSLRSEDTAVYYCTRG |
| | | LYYDPTRADYWGQGTLVTVSS |
| J693FRM2S2R- | 203 | EVQLVQSGAEVKKPGASVKVSCKASGYTFNNYA |
| 29VH | | ISWVRQAPGQGLEWMGGIIPILGTANYAQKFQG |
| | | RVTITADESTSTVYMELSSLRSEDTAVYYCARG |
| | | LYYDPTRADYWGQGTLVTVSS |
| J693FRM2S2R- | 204 | EVQLVQSGAEVKKPGSSVKVSCKASGGTFSSYA |
| 46VH | | ISWVRQAPGQGLEWMGGIIPILGTANYAQKFQG |
| | | RVTITADESTSTVYMELSSLRSEDTAVYYCTRG |
| | | LYYDPTRADYWGQGTLVTVSS |
| J693FRM2S2R- | 205 | EVQLVQSGAEVKKPGSSVKVSCKASGGTFSSYA |
| 65VH | | ISWVRQAPGQGLEWMGGIIPILGTANYAQKFQG |
| | | RVTITADESTSTVYMELSSLRSEDTAVYYCTRG |
| | | IYYDPTRADYWGQGTLVTVSS |
| J693M2S2L-17VH | 206 | EVQLVQSGAEVKKPGSSVKVSCKASGGTFSSYA |
| | | ISWVRQAPGQGLEWMGGIIPILGTANYAQEFQG |
| | | RVTITADESTSTVYMELSSLRSEDTAVYYCARG |
| | | LYYDPTRADYWGQGTLVTVSS |
| J693M2S2L-32VH | 207 | EVQLVQSGAEVKKPGSSVKVSCKASGGTFSSYA |
| | | ISWVRQAPGQGLEWMGGIIPILGTANYAQKFQG |
| | | RVTITADESTSTVYMELSSLRSEDTAVYYCVRG |
| | | LYYDPTRADYWGQGTLVTVSS |
| J693M2S2L-67VH | 208 | EVQLVQSGAEVKKPGSSVKVSCKASGGTFSSYA |
| | | ISWVRQAPGQGLEWMGGIIPILGTASYAQKFQG |
| | | RVTITADESTSTVYMELSSLRSEDTAVYYCARG |
| | | LYYDPTRADYWGQGTLVTVSS |
| J693M2S2L-75VH | 209 | EVQLVQSGAEVKKPGSSVKVSCKASGGTFSSYA |
| | | ISWVRQAPGQGLEWMGGIIPILGTANYAQKFQG |
| | | RVTITADESTSTVYMELSSLRSEDTAVYYCAKG |
| | | LYYDPTRADYWGQGTLVTVSS |
| J693M2S2L-78VH | 210 | EVQLVQSGAEVKKPGSSVKVSCKASGGTFSSYA |
| | | ISWVRQAPGQGLEWMGGIIPILGTANYAQKFQG |
| | | RVTITADESTSTVYMELSSLRSEDTAVYYCERG |
| | | LYYDPTRADYWGQGTLVTVSS |
| J693M2S2L-79VH | 211 | EVQLVQSGAEVKKPGSSVKVSCKASGGTFSNYA |
| | | ISWVRQAPGQGLEWMGGIIPILGTANYAQKFQG |
| | | RVTITADESTSTVYMELSSLRSEDTAVYYCARG |
| | | LYYDPTRADYWGQGTLVTVSS |
| J693M2S2L-94VH | 212 | EVQLVQSGAEVKKPGSSVKVSCKASGGTFSSYA |
| | | ISWVRQAPGQGLEWMGGIIPILGTANYAHKFQG |
| | | RVTITADESTSTVYMELSSLRSEDTAVYYCARG |
| | | LYYDPTRADYWGQGTLVTVSS |
| J693M2S2R-22VH | 213 | EVQLVQSGAEVKKPGSSVKVSCKASGGTFSSYA |
| | | ISWVRQAPGQGLEWMGGIIPILGTANYAQKFQG |
| | | RVTITADESTSTVYMELSSLRSEDTAVYYCARG |
| | | LYYDPTRADCWGQGTLVTVSS |
| J693M2S2R-24VH | 214 | EVQLVQSGAEVKKPGSSVKVSCKASGGTFSSYA |
| | | ISWVQQAPGQGLEWMGGIIPILGTANYAQKFQG |
| | | RVTITADESTSTVYMELSSLRSEDTAVYYCARG |
| | | LYYDPTRADYWGQGTLVTVSS |
| J693M2S2R-2VH | 215 | EVQLVQSGAEVKKPGSSVKVSCKASGGTFSSYA |
| | | ISWVRQAPGQGLEWMGGITPILGTANYAQKFQG |
| | | RVTITADESTSTVYMELSSLRSEDTAVYYCARG |
| | | LYYDPTRADYWGQGTLVTVSS |
| J693M2S2R-31VH | 216 | EVQLVQSGAEVKKPGSSVKVSCKASGGTFSSYA |
| | | ISWVRQAPGQGLEWMGGIIPILGTANYAQKFQG |
| | | RVTITADESTSTVYMELSSLRSEDTAVYYCARG |
| | | LYYDPTRADYWGQGTLVTVSS |
| J693M2S2R-71VH | 217 | EVQLVQSGAEVKKPGSSVKVSCKASGGTFSSYA |
| | | TSWVRQAPGQGLEWMGGIIPILGTANYAQKFQG |
| | | RVTITADESTSTVYMELSSLRSEDTAVYYCARG |
| | | LYYDPTRADYWGQGTLVTVSS |
| J693M2S2R-84VH | 218 | EVQLVQSGAEVKKPGSSVKVSCKASGGTFSSYA |
| | | ISWVRQAPGQGLEWMGGIIPILGTANYAQKFLG |
| | | RVTITADESTSTVYMELSSLRSEDTAVYYCARG |
| | | LYYDPTRADYWGQGTLVTVSS |
| J693M2S2R-89VH | 219 | EVQLVQSGAEVKKPGSSVKVSCKASGGTSSSYA |
| | | ISWVRQAPGQGLEWMGGIIPILGTANYAQKFQG |
| | | RVTITADESTSTVYMELSSLRSEDTAVYYCARG |
| | | LYYDPTRADYWGQGTLVTVSS |
| J703M1S3-10VH | 220 | EVQLVQSGAEVKKPGSSVKVSCKASGGTFSWYA |
| | | ISWVRQAPGQGLEWMGGITPILGSATYAQKFQG |
| | | RVTITADESTSTVYMELSSLRSEDTAVYYCARG |
| | | LYYDPKRADYWGQGTLVTVSS |
| J703M1S3-11VH | 221 | EVQLVQSGAEVKKPGSSVKVSCKASGGTFSWYA |
| | | ISWVRQAPGQGLEWMGGITPILGAASYAQKFQG |
| | | RVTITADESTSTVYMELSSLRSEDTAVYYCARG |
| | | IYYDPTRADYWGQGTLVTVSS |
| J703M1S3-12VH | 222 | EVQLVQSGAEVKKPGSSVKVSCKASGGTFSWYA |
| | | ISWVRQAPGQGLEWMGGITPILGAASYAQKFQG |
| | | RVTITADESTSTVYMELSSLRSEDTAVYYCARG |
| | | IYYDPARADYWGQGTLVTVSS |
| J703M1S3-13VH | 223 | EVQLVQSGAEVKKPGSSVKVSCKASGGTFSWYA |
| | | ISWVRQAPGQGLEWMGGITPILGAANYAQKFQG |
| | | RVTITADESTSTVYMELSSLRSEDTAVYYCARG |
| | | VYYDPKRADYWGQGTLVTVSS |
| J703M1S3-14VH | 224 | EVQLVQSGAEVKKPGSSVKVSCKASGGTFSWYT |
| | | ISWVRQAPGQGLEWMGGIMPILGSPTYAQKFQG |
| | | RVTITADESTSTVYMELSSLRSEDTAVYYCARG |
| | | VYYDPRRADYWGQGTLVTVSS |
| J703M1S3-16VH | 225 | EVQLVQSGAEVKKPGSSVKVSCKASGGTFSWYA |
| | | ISWVRQAPGQGLEWMGGITPILGSATYAQKFQG |
| | | RVTITADESTSTVYMELSSLRSEDTAVYYCARG |
| | | IYYDPKRADYWGQGTLVTVSS |
| J703M1S3-17VH | 226 | EVQLVQSGAEVKKPGSSVKVSCKASGGTFSWYA |
| | | ISWVRQAPGQGLEWMGGIVPILGTPIYAQKFQG |
| | | RVTITADESTSTVYMELSSLRSEDTAVYYCARG |
| | | VYYDPKRADYWGQGTLVTVSS |
| J703M1S3-18VH | 227 | EVQLVQSGAEVKKPGSSVKVSCKASGGTFSWYA |
| | | ISWVRQAPGQGLEWMGGITPILGSANYAQKFQG |
| | | RVTITADESTSTVYMELSSLRSEDTAVYYCARG |
| | | LYYDPARADYWGQGTLVTVSS |
| J703M1S3-19VH | 228 | EVQLVQSGAEVKKPGSSVKVSCKASGGTFSWYA |
| | | ISWVRQAPGQGLEWMGGITPILGSPTYAQKFQG |
| | | RVTITADESTSTVYMELSSLRSEDTAVYYCARG |
| | | VYYDPKRADYWGQGTLVTVSS |
| J703M1S3-1VH | 229 | EVQLVQSGAEVKKPGSSVKVSCKASGGTFSWYT |
| | | ISWVRQAPGQGLEWMGGIMPILGTPVYAQKFQG |
| | | RVTITADESTSTVYMELSSLRSEDTAVYYCARG |
| | | VYYDFRRANYWGQGTLVTVSS |
| J703M1S3-20VH | 230 | EVQLVQSGAEVKKPGSSVKVSCKASGGTFSWYA |
| | | ISWVRQAPGQGLEWMGGITPILGAATYAQKFQG |
| | | RVTITADESTSTVYMELSSLRSEDTAVYYCARG |
| | | IYYDPKRADYWGQGTLVTVSS |
| J703M1S3-21VH | 231 | EVQLVQSGAEVKKPGSSVKVSCKASGGTFSWYA |
| | | ISWVRQAPGQGLEWMGGITPILGDPIYAQKFQG |
| | | RVTITADESTSTVYMELSSLRSEDTAVYYCARG |
| | | IYYDPKRADYWGQGTLVTVSS |
| J703M1S3-22VH | 232 | EVQLVQSGAEVKKPGSSVKVSCKASGGTFSWYA |
| | | ISWVRQAPGQGLEWMGGITPILGNPIYAQKFQG |
| | | RVTITADESTSTVYMELSSLRSEDTAVYYCARG |
| | | IYYDYKRADYWGQGTLVTVSS |
| J703M1S3-25VH | 233 | EVQLVQSGAEVKKPGSSVKVSCKASGGTFSWYA |
| | | ISWVRQAPGQGLEWMGGITPILGSANYAQKFQG |
| | | RVTITADESTSTVYMELSSLRSEDTAVYYCARG |
| | | LFYDFRRADYWGQGTLVTVSS |
| J703M1S3-28VH | 234 | EVQLVQSGAEVKKPGSSVKVSCKASGGTFAWYA |
| | | ISWVRQAPGQGLEWMGGITPILGNAIYAQKFQG |
| | | RVTITADESTSTVYMELSSLRSEDTAVYYCARG |
| | | VYYDPKRADYWGQGTLVTVSS |
| J703M1S3-29VH | 235 | EVQLVQSGAEVKKPGSSVKVSCKASGGTFSWYA |
| | | ISWVRQAPGQGLEWMGGITPILGNPIYAQKFQG |
| | | RVTITADESTSTVYMELSSLRSEDTAVYYCARG |
| | | VYYDPKRADYWGQGTLVTVSS |
| J703M1S3-2VH | 236 | EVQLVQSGAEVKKPGSSVKVSCKASGGTFSWYA |
| | | TSWVRQAPGQGLEWMGGITPILGSPIYAQKFQG |
| | | RVTITADESTSTVYMELSSLRSEDTAVYYCARG |
| | | VYYDHRRADYWGQGTLVTVSS |
| J703M1S3-34VH | 237 | EVQLVQSGAEVKKPGSSVKVSCKASGGTFSWYA |
| | | ISWVRQAPGQGLEWMGGITPILGSPIYAQKFQG |
| | | RVTITADESTSTVYMELSSLRSEDTAVYYCARG |
| | | VYYDYKRADYWGQGTLVTVSS |
| J703M1S3-37VH | 238 | EVQLVQSGAEVKKPGSSVKVSCKASGGTFSWYA |
| | | ISWVRQAPGQGLEWMGGITPILGSAIYAQKFQG |
| | | RVTITADESTSTVYMELSSLRSEDTAVYYCARG |
| | | VYYDPKRADYWGQGTLVTVSS |
| J703M1S3-38VH | 239 | EVQLVQSGAEVKKPGSSVKVSCKASGGTFSWYA |
| | | ISWVRQAPGQGLEWMGGITPILGTPIYAQKFQG |
| | | RVTITADESTSTVYMELSSLRSEDTAVYYCARG |
| | | VYYDFKRADYWGQGTLVTVSS |
| J703M1S3-3VH | 240 | EVQLVQSGAEVKKPGSSVKVSCKASGGTFSWYT |
| | | ISWVRQAPGQGLEWMGGIMPILGTPIYAQKFQG |
| | | RVTITADESTSTVYMELSSLRSEDTAVYYCARG |
| | | VYYDPRRADYWGQGTLVTVSS |
| J703M1S3-41VH | 241 | EVQLVQSGAEVKKPGSSVKVSCKASGGTFSWYA |
| | | ISWVRQAPGQGLEWMGGITPILGSANYAQKFQG |
| | | RVTITADESTSTVYMELSSLRSEDTAVYYCARG |
| | | VYYDPKRADYWGQGTLVTVSS |
| J703M1S3-42VH | 242 | EVQLVQSGAEVKKPGSSVKVSCKASGGTFSWYA |
| | | ISWVRQAPGQGLEWMGGITPILGAPVYAQKFQG |
| | | RVTITADESTSTVYMELSSLRSEDTAVYYCARG |
| | | VYYDPKRADYWGQGTLVTVSS |
| J703M1S3-45VH | 243 | EVQLVQSGAEVKKPGSSVKVSCKASGGTFSWYA |
| | | ISWVRQAPGQGLEWMGGITPILGSAIYAQKFQG |
| | | RVTITADESTSTVYMELSSLRSEDTAVYYCARG |
| | | VYYDPKRADYWGQGTLVTVSS |
| J703M1S3-46VH | 244 | EVQLVQSGAEVKKPGSSVKVSCKASGGTFSWYA |
| | | ISWVRQAPGQGLEWMGGITPILGSPIYAQKFQG |
| | | RVTITADESTSTVYMELSSLRSEDTAVYYCARG |
| | | IYYDPKRADYWGQGTLVTVSS |
| J703M1S3-47VH | 245 | EVQLVQSGAEVKKPGSSVKVSCKASGGTFSWYT |
| | | ISWVRQAPGQGLEWMGGIMPILGSANYAQKFQG |
| | | RVTITADESTSTVYMELSSLRSEDTAVYYCARG |
| | | IYYDPKRADYWGQGTLVTVSS |
| J703M1S3-4VH | 246 | EVQLVQSGAEVKKPGSSVKVSCKASGGTFSWYA |
| | | ISWVRQAPGQGLEWMGGITPILGNAIYAQKFQG |
| | | RVTITADESTSTVYMELSSLRSEDTAVYYCARG |
| | | IYYDPKRADYWGQGTLVTVSS |
| J703M1S3-50VH | 247 | EVQLVQSGAEVKKPGSSVKVSCKASGGTFSWYA |
| | | ISWVRQAPGQGLEWMGGITPILGAATYAQKFQG |
| | | RVTITADESTSTVYMELSSLRSEDTAVYYCARG |
| | | VYYDPKRADYWGQGTLVTVSS |
| J703M1S3-51VH | 248 | EVQLVQSGAEVKKPGSSVKVSCKASGGTFSWYA |
| | | ISWVRQAPGQGLEWMGGITPILGSPIYAQKFQG |
| | | RVTITADESTSTVYMELSSLRSEDTAVYYCARG |
| | | IYYDYRRADYWGQGTLVTVSS |
| J703M1S3-53VH | 249 | EVQLVQSGAEVKKPGSSVKVSCKASGGTFSWYA |
| | | ISWVRQAPGQGLEWMGGIMPILGIPTYAQKFQG |
| | | RVTITADESTSTVYMELSSLRSEDTAVYYCARG |
| | | VYYDPARADYWGQGTLVTVSS |
| J703M1S3-54VH | 250 | EVQLVQSGAEVKKPGSSVKVSCKASGGTFSWYA |
| | | ISWVRQAPGQGLEWMGGITPILGSPIYAQKFQG |
| | | RVTITADESTSTVYMELSSLRSEDTAVYYCARG |
| | | VYYDPKRADYWGQGTLVTVSS |
| J703M1S3-57VH | 251 | EVQLVQSGAEVKKPGSSVKVSCKASGGTFSWYA |
| | | ISWVRQAPGQGLEWMGGITPILGSAVYAQKFQG |
| | | RVTITADESTSTVYMELSSLRSEDTAVYYCARG |
| | | VYYDPKRADYWGQGTLVTVSS |
| J703M1S3-5VH | 252 | EVQLVQSGAEVKKPGSSVKVSCKASGGTFSWYA |
| | | ISWVRQAPGQGLEWMGGITPILGSAIYAQKFQG |
| | | RVTITADESTSTVYMELSSLRSEDTAVYYCARG |
| | | IYYDYKRADYWGQGTLVTVSS |
| J703M1S3-62VH | 253 | EVQLVQSGAEVKKPGSSVKVSCKASGGTFSWYA |
| | | ISWVRQAPGQGLEWMGGITPILGYPIYAQKFQG |
| | | RVTITADESTSTVYMELSSLRSEDTAVYYCARG |
| | | VYYDPKRADYWGQGTLVTVSS |
| J703M1S3-6VH | 254 | EVQLVQSGAEVKKPGSSVKVSCKASGGTFSWYA |
| | | ISWVRQAPGQGLEWMGGITPILGAATYAQKFQG |
| | | RVTITADESTSTVYMELSSLRSEDTAVYYCARG |
| | | IYYDFRRADYWGQGTLVTVSS |
| J703M1S3-72VH | 255 | EVQLVQSGAEVKKPGSSVKVSCKASGGTFSWYP |
| | | ISWVRQAPGQGLEWMGGITPILGSAIYAQKFQG |
| | | RVTITADESTSTVYMELSSLRSEDTAVYYCARG |
| | | VYYDFRRADYWGQGTLVTVSS |
| J703M1S3-78VH | 256 | EVQLVQSGAEVKKPGSSVKVSCKASGGTFSWYA |
| | | ISWVRQAPGQGLEWMGGITPILGTANYAQKFQG |
| | | RVTITADESTSTVYMELSSLRSEDTAVYYCARG |
| | | VYYDPKRADYWGQGTLVTVSS |
| J703M1S3-79VH | 257 | EVQLVQSGAEVKKPGSSVKVSCKASGGTFSWYA |
| | | ISWVRQAPGQGLEWMGGITPILGSAVYAQKFQG |
| | | RVTITADESTSTVYMELSSLRSEDTAVYYCARG |
| | | IYYDPKRADYWGQGTLVTVSS |
| J703M1S3-7VH | 258 | EVQLVQSGAEVKKPGSSVKVSCKASGGTFSWYA |
| | | ISWVRQAPGQGLEWMGGITPILGNPIYAQKFQG |
| | | RVTITADESTSTVYMELSSLRSEDTAVYYCARG |
| | | VYYDPARADYWGQGTLVTVSS |
| J703M1S3-81VH | 259 | EVQLVQSGAEVKKPGSSVKVSCKASGGTFSWYT |
| | | ISWVRQAPGQGLEWMGGIMPILGAPNYAQKFQG |
| | | RVTITADESTSTVYMELSSLRSEDTAVYYCARG |
| | | VYYDYTRADYWGQGTLVTVSS |
| J703M1S3-83VH | 260 | EVQLVQSGAEVKKPGSSVKVSCKASGGTFAWYA |
| | | ISWVRQAPGQGLEWMGGITPILGSPTYAQKFQG |
| | | RVTITADESTSTVYMELSSLRSEDTAVYYCARG |
| | | VYYDPKRADYWGQGTLVTVSS |
| J703M1S3-86VH | 261 | EVQLVQSGAEVKKPGSSVKVSCKASGGTFGWYA |
| | | TSWVRQAPGQGLEWMGGIIPILGTPNYAQKFQG |
| | | RVTITADESTSTVYMELSSLRSEDTAVYYCARG |
| | | VYYDPKRADYWGQGTLVTVSS |
| J703M1S3-87VH | 262 | EVQLVQSGAEVKKPGSSVKVSCKASGGTFSWYT |
| | | ISWVRQAPGQGLEWMGGIMPILGTPTYAQKFQG |
| | | RVTITADESTSTVYMELSSLRSEDTAVYYCARG |
| | | VYYDPKRADYWGQGTLVTVSS |
| J703M1S3-88VH | 263 | EVQLVQSGAEVKKPGSSVKVSCKASGGTFSWYT |
| | | ISWVRQAPGQGLEWMGGIMPILGSPNYAQKFQG |
| | | RVTITADESTSTVYMELSSLRSEDTAVYYCARG |
| | | IYYDPKRADYWGQGTLVTVSS |
| J703M1S3-91VH | 264 | EVQLVQSGAEVKKPGSSVKVSCKASGGTFSWYA |
| | | ISWVRQAPGQGLEWMGGIMPILGSATYAQKFQG |
| | | RVTITADESTSTVYMELSSLRSEDTAVYYCARG |
| | | VYFDPKRADYWGQGTLVTVSS |
| J703M1S3-93VH | 265 | EVQLVQSGAEVKKPGSSVKVSCKASGGTFSWYA |
| | | ISWVRQAPGQGLEWMGGITPILGAANYAQKFQG |
| | | RVTITADESTSTVYMELSSLRSEDTAVYYCARG |
| | | LYYDPKRADYWGQGTLVTVSS |
| J703M1S3-9VH | 266 | EVQLVQSGAEVKKPGSSVKVSCKASGGTFSWYP |
| | | ISWVRQAPGQGLEWMGGITPILGAGIYAQKFQG |
| | | RVTITADESTSTVYMELSSLRSEDTAVYYCARG |
| | | VYYDFKRADYWGQGTLVTVSS |

[0102] Table 12 provides a list of amino acid sequences of VL regions of affinity matured fully human TNF antibodies derived from AE11-5. Amino acid residues of individual CDRs of each VH sequence are indicated in bold.

TABLE 12
List of amino acid sequences of affinity matured
AE11-5 VL variants

| Clone | SEQ ID NO: | VL |
|---|---|---|
| J685M2S2-17Vk | 267 | EIVLTQSPDFQSVTPKEKVTITCRASQSIGSSLH |
| | | WYQQKPDQSPKLLIKHASQSISGVPSRFSGSGSG |
| | | TDFTLTINSLEAEDAATYYCHQSSSSPPPTFGQG |
| | | TKVEIK |
| J685M2S2-94Vk | 268 | EIVLTQSPDFQSVTPKEKVTITCRASQSIGSSLH |
| | | WYQQKPDQSPKLLIKHASQSISGVPSRFSGSGSG |
| | | TDFTLTINSLEAEDAATYYCHQSSSSPPPTFGQW |
| | | TKVEIK |
| J688M2-37Vk | 269 | EIVLTQSPDFQSVTPKEKVTITCRARQSIGSSLH |
| | | WYQQKPDQSPKLLIKHASQSISGVPSRFSGSGSG |
| | | TNFTLTINSLEAEDAATYYCHQSSSSPPPTFGQG |
| | | TKVEIK |
| J688M2-90Vk | 270 | EIVLTQSPDFQSVTPKEKVTITCRASQSIGSSLH |
| | | WYQQKPDQSPKLLIKHASQSISGVPSRFSGSGSG |
| | | TDFTLTINSLEAEDAATYYCHQSSSSPPPTFGQG |
| | | TKVEIK |
| J693FRM2S2L- | 271 | EIVLTQSPDFQSVTPKEKVTITCRASQSIGRSLH |
| 26Vk | | WYQQKPDQSPKLLIKHASQSVSGVPSRFSGSGSG |
| | | TDFTLTINSLEAEDAATYYCHQNRSSPPSTFGQG |
| | | TKVEIK |
| J693FRM2S2L- | 272 | EIVLTQSPDFQSVTPKEKVTITCRASQSIGRSLH |
| 27Vk | | WYQQKPDQSPKLLIKYASQSLSGVPSRFSGSGSG |
| | | TDFTLTINSLEAEDAATYYCHQSSSSPPVTFGQG |
| | | TKVEIK |
| J693FRM2S2L- | 273 | EIVLTQSPDFQSVTPKEKVTITCRASQSIGSSLH |
| 29Vk | | WYQQKPDQSPKLLIKYASQSISGVPSRFSGSGSG |
| | | TDFTLTINSLEAEDAATYYCHQRSNLPAPTFGQG |
| | | TKVEIK |
| J693FRM2S2L- | 274 | EIVLTQSPDFQSVTPKEKVTITCRASQIIGGSLH |
| 39Vk | | WYQQKPDQSPKLLIKYASQSFSGVPSRFSGSGSG |
| | | TDFTLTINSLEAEDAATYYCHQPICSPPRTFGQG |
| | | TKVEIK |
| J693FRM2S2L- | 275 | EIVLTQSPDFQSVTPKEKVTITCRASQTIGSNLH |
| 3Vk | | WYQQKPDQSPKLLIKYASQSLSGVPSRFSGSGSG |
| | | TDFTLTINSLEAEDAATYYCHQCSISPPATFGQG |
| | | TKVEIK |
| J693FRM2S2L- | 276 | EIVLTQSPDFQSVTPKEKVTITCRASQCIGTSLH |
| 40Vk | | WYQQKPDQSPKLLIKYDSQSISGVPSRFSGSGSG |
| | | TDFTLTINSLEAEDAATYYCHQNSSSPPPTFGQG |
| | | TKVEIK |
| J693FRM2S2L- | 277 | EIVLTQSPDFQSVTPKEKVTITCRASQNIGNSLH |
| 42Vk | | WYQQKPDQSPKLLIKYTSQSISGVPSRFSGSGSG |
| | | TDFTLTINSLEAEDAATYYCHQTSSLPLPTFGQG |
| | | TKVEIK |
| J693FRM2S2L- | 278 | EIVLTQSPDFQSVTPKEKVTITCRASQSIGSSLH |
| 43Vk | | WYQQKPDQSPKLLIKYVSQSISGVPSRFSGSGSG |
| | | TDFTLTINSLEAEDAATYYCHQISDLPTSTFGQG |
| | | TKVEIK |
| J693FRM2S2L- | 279 | EIVLTQSPDFQSVTPKEKVTITCRASQRIGSNLH |
| 45Vk | | WYQQKPDQSPKLLIKYASQSISGVPSRFSGSGSG |
| | | TDFTLTINSLEAEDAATYYCHQGSSLPPPTFGQG |
| | | TKVEIK |
| J693FRM2S2L- | 280 | EIVLTQSPDFQSVTPKEKVTITCRASQCIGSSLH |
| 46Vk | | WYQQKPDQSPKLLIKHTSQSNSGVPSRFSGSGSG |
| | | TDFTLTINSLEAEDAATYYCHQSNSSPLSTFGQG |
| | | TKVEIK |
| J693FRM2S2L- | 281 | EIVLTQSPDFQSVTPKEKVTITCRASQNIGGSLH |
| 47Vk | | WYQQKPDQSPKLLIKYASQSISGVPSRFSGSGSG |
| | | TDFTLTINSLEAEDAATYYCHQNSSLPLPTFGQG |
| | | TKVEIK |
| J693FRM2S2L- | 282 | EIVLTQSPDFQSVTPKEKVTITCRASQSIGSRLH |
| 48Vk | | WYQQKPDQSPKLLIKYASQSISGVPSRFSGSGSG |
| | | TDFTLTINSLEAEDAATYYCHQSSKSPPPTFGQG |
| | | TKVEIK |
| J693FRM2S2L- | 283 | EIVLTQSPDFQSVTPKEKVTITCRASQSIGSCLH |
| 52Vk | | WYQQKPDQSPKLLIKYASQSVSGVPSRFSGSGSG |
| | | TDFTLTINSLEAEDAATYYCHQRSSLPTPTFGQG |
| | | TKVEIK |
| J693FRM2S2L- | 284 | EIVLTQSPDFQSVTPKEKVTITCRASQSIGGRLH |
| 53Vk | | WYQQKPDQSPKLLIKYASQSLSGVPSRFSGSGSG |
| | | TDFTLTINSLEAEDAATYYCHQASSSPSTTFGQG |
| | | TKVEIK |
| J693FRM2S2L- | 285 | EIVLTQSPDFQSVTPKEKVTITCRASQRIGPSLH |
| 54Vk | | WYQQKPDQSPKLLIKYASQSISGVPSRFSGSGSG |
| | | TDFTLTINSLEAEDAATYYCHQNSCLPSTTFGQG |
| | | TKVEIK |
| J693FRM2S2L- | 286 | EIVLTQSPDFQSVTPKEKVTITCRASQSIGRSLH |
| 58Vk | | WYQQKPDQSPKLLIKYASQSRSGVPSRFSGSGSG |
| | | TDFTLTINSLEAEDAATYYCHQSGISPPTTFGQG |
| | | TKVEIK |
| J693FRM2S2L- | 287 | EIVLTQSPDFQSVTPKEKVTITCRASQSIGTSLH |
| 59Vk | | WYQQKPDQSPKLLIKYVSQSISGVPSRFSGSGSG |
| | | TDFTLTINSLEAEDAATYYCHQGMSSPAPTFGQG |
| | | TKVEIK |
| J693FRM2S2L- | 288 | EIVLTQSPDFQSVTPKEKVTITCRASQSIGSSLH |
| 5Vk | | WYQQKPDQSPKLLIKYASQSLSGVPSRFSGSGSG |
| | | TDFTLTINSLEAEDAATYYCHQRRNSPPPTFGQG |
| | | TKVEIK |
| J693FRM2S2L- | 289 | EIVLTQSPDFQSVTPKEKVTITCRASQKIGSGLH |
| 88Vk | | WYQQKPDQSPKLLIKHASQSISGVPSRFSGSGSG |
| | | TDFTLTINSLEAEDAATYYCHQNNSSPHKTFGQG |
| | | TKVEIK |
| J693FRM2S2L- | 290 | EIVLTQSPDFQSVTPKEKVTITCRASQTIGSNLH |
| 89Vk | | WYQQKPDQSPKLLIKHSSQSISGVPSRFSGSGSG |
| | | TDFTLTINSLEAEDAATYYCHQNSSSPLPTFGQG |
| | | TKVEIK |
| J693FRM2S2L- | 291 | EIVLTQSPDFQSVTPKEKVTITCRASQNIGRSLH |
| 8Vk | | WYQQKPDQSPKLLIKYASQSSSGVPSRFSGSGSG |
| | | TDFTLTINSLEAEDAATYYCHQSRSSPPPTFGQG |
| | | TKVEIK |
| J693FRM2S2L- | 292 | EIVLTQSPDFQSVTPKEKVTITCRASQCIGKSLH |
| 90Vk | | WYQQKPDQSPKLLIKHPSQSVSGVPSRFSGSGSG |
| | | TDFTLTINSLEAEDAATYYCHQSIGLPPTTFGQG |
| | | TKVEIK |
| J693FRM2S2L- | 293 | EIVLTQSPDFQSVTPKEKVTITCRASQTIGSSLH |
| 91Vk | | WYQQKPDQSPKLLIKHASQSLSGVPSRFSGSGSG |
| | | TDFTLTINSLEAEDAATYYCHQSSISPPATFGQG |
| | | TKVEIK |
| J693FRM2S2L- | 294 | EIVLTQSPDFQSVTPKEKVTITCRASQSIGSTLH |
| 92Vk | | WYQQKPDQSPKLLIKYESQSISGVPSRFSGSGSG |
| | | TDFTLTINSLEAEDAATYYCHQRCCSPTQTFGQG |
| | | TKVEIK |
| J693FRM2S2L- | 295 | EIVLTQSPDFQSVTPKEKVTITCRASQSIGRKLH |
| 94Vk | | WYQQKPDQSPKLLIKYSSQSISGVPSRFSGSGSG |
| | | TDFTLTINSLEAEDAATYYCHQSSRSPPTTFGQG |
| | | TKVEIK |
| J693FRM2S2R- | 296 | EIVLTQSPDFQSVTPKEKVTITCRASQTIGTSLH |
| 10Vk | | WYQQKPDQSPKLLIKHASQSLSGVPSRFSGSGSG |
| | | TDFTLTINSLEAEDAATYYCHQSSSSPSPTFGQG |
| | | TKVEIK |
| J693FRM2S2R- | 297 | EIVLTQSPDFQSVTPKEKVTITCRASQSIGSSLH |
| 11Vk | | WYQQKPDQSPKLLIKHVSQSISGVPSRFSGSGSG |
| | | TDFTLTINSLEAEDAATYYCHQRGSSPPRTFGQG |
| | | TKVEIK |
| J693FRM2S2R- | 298 | EIVLTQSPDFQSVTPKEKVTITCRASQTIGSTLH |
| 12Vk | | WYQQKPDQSPKLLIKHTSQSISGVPSRFSGSGSG |
| | | TDFTLTINSLEAEDAATYYCHQRSSSPPPTFGQG |
| | | TKVEIK |
| J693FRM2S2R- | 299 | EIVLTQSPDFQSVTPKEKVTITCRASQSIGSNLH |
| 14Vk | | WYQQKPDQSPKLLIKHGSQSISGVPSRFSGSGSG |
| | | TDFTLTINSLEAEDAATYYCHQRHSSPRATFGQG |
| | | TKVEIK |
| J693FRM2S2R- | 300 | EIVLTQSPDFQSVTPKEKVTITCRASQKIGSNLH |
| 15Vk | | WYQQKPDQSPKLLIKYASQSFSGVPSRFSGSGSG |
| | | TDFTLTINSLEAEDAATYYCHQNSSSPPATFGQG |
| | | TKVEIK |
| J693FRM2S2R- | 301 | EIVLTQSPDFQSVTPKEKVTITCRASQSIGRSLH |
| 16Vk | | WYQQKPDQSPKLLIKYASQSISGVPSRFSGSGSG |
| | | TDFTLTINSLEAEDAATYYCHQSSRSPFRTFGQG |
| | | TKVEIK |
| J693FRM2S2R- | 302 | EIVLTQSPDFQSVTPKEKVTITCRASQCIGRRLH |
| 34Vk | | WYQQKPDQSPKLLIKHASQSRSGVPSRFSGSGSG |
| | | TDFTLTINSLEAEDAATYYCHQCTSSPPPTFGQG |
| | | TKVEIK |
| J693FRM2S2R- | 303 | EIVLTQSPDFQSVTPKEKVTITCRASQRIGSNLH |
| 36Vk | | WYQQKPDQSPKLLIKHASQSISGVPSRFSGSGSG |
| | | TDFTLTINSLEAEDAATYYCHQSLRLPPQTFGQG |
| | | TKVEIK |
| J693FRM2S2R- | 304 | EIVLTQSPDFQSVTPKEKVTITCRASQSIGSSLH |
| 39Vk | | WYQQKPDQSPKLLIKHASQSISGVPSRFSGSGSG |
| | | TDFTLTINSLEAEDAATYYCHQNRSLPRLTFGQG |
| | | TKVEIK |
| J693FRM2S2R- | 305 | EIVLTQSPDFQSVTPKEKVTITCRASQSIGSCLH |
| 3Vk | | WYQQKPDQSPKLLIKYASQSISGVPSSSVASGSG |
| | | TDFTLTINSLEAEDAATYYCHQRSSLPQPTFGQG |
| | | TKVEIK |
| J693FRM2S2R- | 306 | EIVLTQSPDFQSVTPKEKVTITCRASQSIGRRLH |
| 42Vk | | WYQQKPDQSPKLLIKHPSQSVSGVPSRFSGSGSG |
| | | TDFTLTINSLEAEDAATYYCHQSIDSPPPTFGQG |
| | | TKVEIK |
| J693FRM2S2R- | 307 | EIVLTQSPDFQSVTPKEKVTITCRASQTIGRSLH |
| 45Vk | | WYQQKPDQSPKLLIKYKSQSSSGVPSRFSGSGSG |
| | | TDFTLTINSLEAEDAATYYCHQRWGLPMPTFGQG |
| | | TKVEIK |
| J693FRM2S2R- | 308 | EIVLTQSPDFQSVTPKEKVTITCRASQRIGSMLH |
| 48Vk | | WYQQKPDQSPKLLIKHSSQSISGVPSRFSGSGSG |
| | | TDFTLTINSLEAEDAATYYCHQTNSLPPRTFGQG |
| | | TKVEIK |
| J693FRM2S2R- | 309 | EIVLTQSPDFQSVTPKEKVTITCRASQSIGRSLH |
| 50Vk | | WYQQKPDQSPKLLIKHASQSISGVPSRFSGSGSG |
| | | TDFTLTINSLEAEDAATYYCHQGSRSPLDTFGQG |
| | | TKVEIK |
| J693FRM2S2R- | 310 | EIVLTQSPDFQSVTPKEKVTITCRASQSIGCSLH |
| 51Vk | | WYQQKPDQSPKLLIKYASQSVSVVPSRFSGSGSG |
| | | TDFTLTINSLEAEDAATYYCHQSSTLPPPTFGQG |
| | | TKVEIK |
| J693FRM2S2R- | 311 | EIVLTQSPDFQSVTPKEKVTITCRASQGIGTSLH |
| 52Vk | | WYQQKPDQSPKLLIKHDSQSISGVPSRFSGSGSG |
| | | TDFTLTINSLEAEDAATYYCHQTSSLPPPTFGQG |
| | | TKVEIK |
| J693FRM2S2R- | 312 | EIVLTQSPDFQSVTPKEKVTITCRASQIIGSSLH |
| 56Vk | | WYQQKPDQSPKLLIKHASQSISGVPSRFSGSGSG |
| | | TDFTLTINSLEAEDAATYYCHQSSSLPLPTFGQG |
| | | TKVEIK |
| J693FRM2S2R- | 313 | EIVLTQSPDFQSVTPKEKVTITCRASQSIGSSLH |
| 58Vk | | WYQQKPDQSPKLLIKYTSQSKSGVPSRFSGSGSG |
| | | TDFTLTINSLEAEDAATYYCHQGNRSPSTTFGQG |
| | | TKVEIK |
| J693FRM2S2R- | 314 | EIVLTQSPDFQSVTPKEKVTITCRASKRIGSSLH |
| 59Vk | | WYQQKPDQSPKLLIKHKSQSISGVPSRFSGSGSG |
| | | TDFTLTINSLEAEDAATYYCHQRSASPPPTFGQG |
| | | TKVEIK |
| J693FRM2S2R- | 315 | EIVLTQSPDFQSVTPKEKVTITCRASQTIGSSLH |
| 5Vk | | WYQQKPDQSPKLLIKHPSQSMSGVPSRFSGSGSG |
| | | TDFTLTINSLEAEDAATYYCHQSSTSPPATFGQG |
| | | TKVEIK |
| J693FRM2S2R- | 316 | EIVLTQSPDFQSVTPKEKVTITCRASQSIGSSLH |
| 60Vk | | WYQQKPDQSPKLLIKHASQSISGVPSRFSGSGSG |
| | | TDFTLTINSLEAEDAATYYCHQRSSLPTPTFGQG |
| | | TKVEIK |
| J693FRM2S2R- | 317 | EIVLTQSPDFQSVTPKEKVTITCRASQSIGSTLH |
| 61Vk | | WYQQKPDQSPKLLIKHASQSFSGVPSRFSGSGSG |
| | | TDFTLTINSLEAEDAATYYCHQSNCSPAHTFGQG |
| | | TKVEIK |
| J693FRM2S2R- | 318 | EIVLTQSPDFQSVTPKEKVTITCRASQTIGSRLH |
| 62Vk | | WYQQKPDQSPKLLIKYVSQSISGVPSRFSGSGSG |
| | | TDFTLTINSLEAEDAATYYCHQGSRLPPPTFGQG |
| | | TKVEIK |
| J693FRM2S2R- | 319 | EIVLTQSPDFQSVTPKEKVTITCRASQRIGSTLH |
| 63Vk | | WYQQKPDQSPKLLIKHASQSNSGVPSRFSGSGSG |
| | | TDFTLTINSLEAEDAATYYCHQSSCSPQATFGQG |
| | | TKVEIK |
| J693FRM2S2R- | 320 | EIVLTQSPDFQSVTPKEKVTITCRASQSIGTSLH |
| 64Vk | | WYQQKPDQSPKLLIKYPSQSISGVPSRFSGSGSG |
| | | TDFTLTINSLEAEDAATYYCHQSGRSPPHTFGQG |
| | | TKVEIK |
| J693FRM2S2R- | 321 | EIVLTQSPDFQSVTPKEKVTITCRASQSIGSSLH |
| 65Vk | | WYQQKPDQSPKLLIKHASQSISGVPSRFSGSGSG |
| | | TDFTLTINSLEAEDAATYYCHQNSILPPPTFGQG |
| | | TKVEIK |
| J693FRM2S2R- | 322 | EIVLTQSPDFQSVTPKEKVTITCRASQCIGSYLH |
| 92Vk | | WYQQKPDQSPKLLIKHVSQSISGVPSRFSGSGSG |
| | | TDFTLTINSLEAEDAATYYCHQSSSSPTLTFGQG |
| | | TKVEIK |
| J693FRM2S2R- | 323 | EIVLTQSPDFQSVTPKEKVTITCRASQSIGSSLH |
| 93Vk | | WYQQKPDQSPKLLIKHASQSMSGVPSGFSGSGSG |
| | | TDFTLTINSLEAEDAATYYCHQTNRSPPPTFGQG |
| | | TKVEIK |
| J693FRM2S2R- | 324 | EIVLTQSPDFQSVTPKEKVTITCRASQNIGTSLH |
| 9Vk | | WYQQKPDQSPKLLIKYVSQSISGVPSRFSGSGSG |
| | | TDFTLNINSLEAEDAATYYCHQSSCLPRPTFGQG |
| | | TKVEIK |
| J693M2S2L-10Vk | 325 | EIVLTQSPDFQSVTPKEKVTITCRASQSIGSPLH |
| | | WYQQKPDQSPKLLIKYASQSISGVPSRFSGSGSG |
| | | TDFTLTINSLEAEDAATYYCHQGSSSPPPTFGQG |
| | | TKVEIK |
| J693M2S2L-11Vk | 326 | EIVLTQSPDFQSVTPKEKVTITCRASQSIGSTLH |
| | | WYQQKPDQSPKLLIKHDSQSKSGVPSRFSGSGSG |
| | | TDFTLTINSLEAEDAATYYCHQSSDSPAPTFGQG |
| | | TKVEIK |
| J693M2S2L-12Vk | 327 | EIVLTQSPDFQSVTPKEKVTITCRASQSIGSCLH |
| | | WYQQKPDQSPKLLIKHASQSNSGVPSRFSGSGSG |
| | | TDFTLTINSLEAEDAATYYCHQSRISPLPTFGQG |
| | | TKVEIK |
| J693M2S2L-13Vk | 328 | EIVLTQSPDFQSVTPKEKVTITCRASQSIGRRLH |
| | | WYQQKPDQSPKLLIKHSSQSISGVPSRFSGSGSG |
| | | TDFTLTINSLEAEDAATYYCHQCSSLPHPTFGQG |
| | | TKVEIK |
| J693M2S2L-14Vk | 329 | EIVLTQSPDFQSVTPKEKVTITCRASQRIGSRLH |
| | | WYQQKPDQSPKLLIKHASQSTSGVPSRFSGSGSG |
| | | TDFTLTINSLEAEDAATYYCHQSCSSPLVTFGQG |
| | | TKVEIK |
| J693M2S2L-16Vk | 330 | EIVLTQSPDFQSVTPKEKVTITCRASQSIGSRLH |
| | | WYQQKPDQSPKLLIKHASQSSSGVPSRFSGSGSG |
| | | TDFTLTINSLEAEDAATYYCHQSGSSPQATFGQG |
| | | TKVEIK |
| J693M2S2L-17Vk | 331 | EIVLTQSPDFQSVTPKEKVTITCRASQSIGSSLH |
| | | WYQQKPDQSPKLLIKHASQSVSGVPSRFSGSGSG |
| | | TDFTLTINSLEAEDAATYYCHQNRGSPPQTFGQG |
| | | TKVEIK |
| J693M2S2L-18Vk | 332 | EIVLTQSPDFQSVTPKEKVTITCRASQTIGSILH |
| | | WYQQKPDQSPKLLIKHASQSISGVPSRFSGSGSG |
| | | TDFTLTINSLEAEDAATYYCHQNTSLPPPTFGQG |
| | | TKVEIK |
| J693M2S2L-19Vk | 333 | EIVLTQSPDFQSVTPKEKVTITCRASQSIGNSLH |
| | | WYQQKPDQSPKLLIKYPSQSISGVPSRFSGSGSG |
| | | TDFTLTINSLEAEDAATYYCHQGSRLPVPTFGQG |
| | | TKVEIK |
| J693M2S2L-1Vk | 334 | EIVLTQSPDFQSVTPKEKVTITCRASQSIGSRLH |
| | | WYQQKPDQSPKLLIKHTSQSNSGVPSRFSGSGSG |
| | | TDFTLTINSLEAEDAATYYCHQSSSLPAPTFGQG |
| | | TKVEIK |
| J693M2S2L-20Vk | 335 | EIVLTQSPDFQSVTPKEKVTITCRASQNIGSSLH |
| | | WYQQKPDQSPKLLIKHVSQSISGVPSRFSGSGSG |
| | | TDFTLTINSLEAEDAATYYCHQSNSLPAPTFGQG |
| | | TKVEIK |
| J693M2S2L-21Vk | 336 | EIVLTQSPDFQSVTPKEKVTITCRASQSIGSSLH |
| | | WYQQKPDQSPKLLIKHASQSISGVPSRFSGSGSG |
| | | TDFTLTINSLEAEDAATYYCHQSMSLPSATFGQG |
| | | TKVEIK |
| J693M2S2L-22Vk | 337 | EIVLTQSPDFQSVTPKEKVTITCRASQRIGSSLH |
| | | WYQQKPDQSPKLLIKHLSQSISGVPSRFSGSGSG |
| | | TDFTLTINSLEAEDAATYYCHQPCRLPPSTFGQG |
| | | TKVEIK |
| J693M2S2L-23Vk | 338 | EIVLTQSPDFQSVTPKEKVTITCRASQSIGSLLH |
| | | WYQQKPDQSPKLLIKHASQSISGVPSRFSGSGSG |
| | | TDFTLTINSLEAEDAATYYCHQSCSSPRHTFGQG |
| | | TKVEIK |
| J693M2S2L-24Vk | 339 | EIVLTQSPDFQSVTPKEKVTITCRASQRIGSSLH |
| | | WYQQKPDQSPKLLIKHPSQSKSGVPSRFSGSGSG |
| | | TDFTLTINSLEAEDAATYYCHQSSRSPAPTFGQG |
| | | TKVEIK |
| J693M2S2L-25Vk | 340 | EIVLTQSPDFQSVTPKEKVTITCRASQSIGGSLH |
| | | WYQQKPDQSPKLLIKYSSQSLSGVPSRFSGSGSG |
| | | TDFTLTINSLEAEDAATYYCHQSSILPSLTFGQG |
| | | TKVEIK |
| J693M2S2L-26Vk | 341 | EIVLTQSPDFQSVTPKEKVTITCRASQSIGSSLH |
| | | WYQQKPDQSPKLLIKHPSQSISGVPSRFSGSGSG |
| | | TDFTLTINSLEAEDAATYYCHQSRNLPPRTFGQG |
| | | TKVEIK |
| J693M2S2L-27Vk | 342 | EIVLTQSPDFQSVTPKEKVTITCRASQSIGSILH |
| | | WYQQKPDQSPKLLIKYGSQSLSGVPSRFSGSGSG |
| | | TDFTLTINSLEAEDAATYYCHQNGSSPPRTFGQG |
| | | TKVEIK |
| J693M2S2L-28Vk | 343 | EIVLTQSPDFQSVTPKEKVTITCRASQSIGSSLH |
| | | WYQQKPDQSPKLLIKYFSQSISGVPSRFSGSGSG |
| | | TDFTLTINSLEAEDAATYYCHQNSCLPMQTFGQG |
| | | TKVEIK |
| J693M2S2L-29Vk | 344 | EIVLTQSPDFQSVTPKEKVTITCRASQNIGSSLH |
| | | WYQQKPDQSPKLLIKYSSQSVSGVPSRFSGSGSG |
| | | TDFTLTINSLEAEDAATYYCHQSSISPPATFGQG |
| | | TKVEIK |
| J693M2S2L-2Vk | 345 | EIVLTQSPDFQSVTPKEKVTITCRASQCIGSSLH |
| | | WYQQKPDQSPKLLIKHASQSNSGVPSRFSGSGSG |
| | | TDFTLTINSLEAEDAATYYCHQSTCLPPRTFGQG |
| | | TKVEIK |
| J693M2S2L-30Vk | 346 | EIVLTQSPDFQSVTPKEKVTITCRASQSIGSRLH |
| | | WYQQKPDQSPKLLIKYVSQSMSGVLSRFSGSGSG |
| | | TDFTLTINSLEAEDAATYYCHQPSTSPRPTFGQG |
| | | TKVEIK |
| J693M2S2L-31Vk | 347 | EIVLTQSPDFQSVTPKEKVTITCRASQSIGSRLH |
| | | WYQQKPDQSPKLLIKHASQSISGVPSRFSGSGSG |
| | | TDFTLTINSLEAEDAATYYCHQNSSLPPSTFGQG |
| | | TKVEIK |
| J693M2S2L-32Vk | 348 | EIVLTQSPDFQSVTPKEKVTITCRASQSIGCSLH |
| | | WYQQKPDQSPKLLIKYASQSNSGVPSRFSGSGSG |
| | | TDFTLTINSLEAEDAATYYCHQSSSSPSSTFGQG |
| | | TKVEIK |
| J693M2S2L-33Vk | 349 | EIVLTQSPDFQSVTPKEKVTITCRASQIIGTSLH |
| | | WYQQKPDQSPKLLIKYASQSISGVPSRFSGSGSG |
| | | TDFTLTINSLEAEDAATYYCHQSSRSPPRTFGQG |
| | | TKVEIK |
| J693M2S2L-34Vk | 350 | EIVLTQSPDFQSVTPKEKVTITCRASQKIGTSLH |
| | | WYQQKPDQSPKLLIKHESQSISGVPSRFSGSGSG |
| | | TDFTLTINSLEAEDAATYYCHQSSGSPPPTFGQG |
| | | TKVEIK |
| J693M2S2L-35Vk | 351 | EIVLTQSPDFQSVTPKEKVTITCRASQTIGGSLH |
| | | WYQQKPDQSPKLLIKHVSQSVSGVPSRFSGSGSG |
| | | TDFTLTINSLEAEDAATYYCHQSSISPPPTFGQG |
| | | TKVEIK |
| J693M2S2L-36Vk | 352 | EIVLTQSPDFQSVTPKEKVTITCRASQSIGSDLH |
| | | WYQQKPDQSPKLLIKHVSQSVSGVPSRFSGSGSG |
| | | TDFTLTINSLEAEDAATYYCHQSCMSPSLTFGQG |
| | | TKVEIK |
| J693M2S2L-37Vk | 353 | EIVLTQSPDFQSVTPKEKVTITCRASQSIGSNLH |
| | | WYQQKPDQSPKLLIKHASQSISGVPSRFSGSGSG |
| | | TDFTLTINSLEAEDAATYYCHQSSSLPNTTFGQG |
| | | TKVEIK |
| J693M2S2L-38Vk | 354 | EIVLTQSPDFQSVTPKEKVTITCRASQRIGSILH |
| | | WYQQKPDQSPKLLIKHASQSISGVPSRFSGSGSG |
| | | TDFTLTINSLEAEDAATYYCHQGRISPSSTFGQG |
| | | TKVEIK |
| J693M2S2L-39Vk | 355 | EIVLTQSPDFQSVTPKEKVTITCRASQSIGNRLH |
| | | WYQQKPDQSPKLLIKHASQSLSGVPSRFSGSGSG |
| | | TDFTLTINSLEAEDAATYYCHQSGSLPTLTFGQG |
| | | TKVEIK |
| J693M2S2L-3Vk | 356 | EIVLTQSPDFQSVTPKEKVTITCRASQTIGSSLH |
| | | WYQQKPDQSPKLLIKHDSQSLSGVPSRFSGSGSG |
| | | TDFTLTINSLEAEDAATYYCHQNSSLPTHTFGQG |
| | | TKVEIK |
| J693M2S2L-40Vk | 357 | EIVLTQSPDFQSVTPKEKVTITCRASQTIGRSLH |
| | | WYQQKPDQSPKLLIKHGSQSISGVPSRFSGSGSG |
| | | TDFTLTINSLEAEDAATYYCHQSRSSPPSTFGQG |
| | | TKVEIK |
| J693M2S2L-41Vk | 358 | EIVLTQSPDFQSVTPKEKVTITCRASQSIGSSLH |
| | | WYQQKPDQSPKLLIKYASQSISGVPSRFSGSGSG |
| | | TDFTLTINSLEAEDAATYYCHQNCSSPPPTFGQG |
| | | TKVEIK |
| J693M2S2L-44Vk | 359 | EIVLTQSPDFQSVTPKEKVTITCRASQSIGSSLH |
| | | WYQQKPDQSPKLLIKYESQSDSGVPSRFSGSGSG |
| | | TDFTLTINSLEAEDAATYYCHQRRNSPPSTFGQG |
| | | TKVEIK |
| J693M2S2L-45Vk | 360 | EIVLTQSPDFQSVTPKEKVTITCRASQGIGSRLH |
| | | WYQQKPDQSPKLLIKHGSQSISGVPSRFSGSGSG |
| | | TDFTLTINSLEAEDAATYYCHQNRGLPAPTFGQG |
| | | TKVEIK |
| J693M2S2L-46Vk | 361 | EIVLTQSPDFQSVTPKEKVTITCRASQSIGSSLH |
| | | WYQQKPDQSPKLLIKYASQSSSGVPSRFSGSGSG |
| | | TDFTLTINSLEAEDAATYYCHQNHTSPPPTFGQG |
| | | TKVEIK |
| J693M2S2L-47Vk | 362 | EIVLTQSPDFQSVTPKEKVTITCRASQSIGSRLH |
| | | WYQQKPDQSPKLLIKHASQSVSGVPSRFSGSGSG |
| | | TDFTLTINSLEAEDAATYYCHQSGRLPPPTFGQG |
| | | TKVEIK |
| J693M2S2L-4Vk | 363 | EIVLTQSPDFQSVTPKEKVTITCRASQYIGKRLH |
| | | WYQQKPDQSPKLLIKYASQSISGVPSRFSGSGSG |
| | | TDFTLTINSLEAEDAATYYCHQSNISPPPTFGQG |
| | | TKVEIK |
| J693M2S2L-51Vk | 364 | EIVLTQSPDFQSVTPKEKVTITCRASQRIGSSLH |
| | | WYQQKPDQSPKLLIKHESQSISGVPSRFSGSGSG |
| | | TDFTLTINSLEAEDAATYYCHQSSSLPPPTFGQG |
| | | TKVEIK |
| J693M2S2L-52Vk | 365 | EIVLTQSPDFQSVTPKEKVTITCRASQTIGSSLH |
| | | WYQQKPDQSPKLLIKYASQSISGVPSRFSGSGSG |
| | | TDFTLTINSLEAEDAATYYCHQRSSLPPSTFGQG |
| | | TKVEIK |
| J693M2S2L-54Vk | 366 | EIVLTQSPDFQSVTPKEKVTITCRASQSIGRSLH |
| | | WYQQKPDQSPKLLIKHPSQSISGVPSRFSGSGSG |
| | | TDFTLTINSLEAEDAATYYCHQCSSSPAQTFGQG |
| | | TKVEIK |
| J693M2S2L-55Vk | 367 | EIVLTQSPDFQSVTPKEKVTITCRASQSIGRSLH |
| | | WYQQKPDQSPKLLIKHTSQSLSGVPSRFSGSGSG |
| | | TDFTLTINSLEAEDAATYYCHQRSSLPLPTFGQG |
| | | TKVEIK |
| J693M2S2L-56Vk | 368 | EIVLTQSPDFQSVTPKEKVTITCRASQWIGSSLH |
| | | WYQQKPDQSPKLLIKHTSQSISGVPSRFSGSGSG |
| | | TDFTLTINSLEAEDAATYYCHQSSSLPPQTFGQG |
| | | TKVEIK |
| J693M2S2L-58Vk | 369 | EIVLTQSPDFQSVTPKEKVTITCRASQSIGRSLH |
| | | WYQQKPDQSPKLLIKYSSQSISGVPSRFSGSGSG |
| | | TDFTLTINSLEAEDAATYYCHQGSSSPPPTFGQG |
| | | TKVEIK |
| J693M2S2L-59Vk | 370 | EIVLTQSPDFQSVTPKEKVTITCRASQSIGSSLH |
| | | WYQQKPDQSPKLLIKHASQSISGVPSRFSGSGSG |
| | | TDFTLTINSLEAEDAATYYCHQSSRLPPSTFGQG |
| | | TKVEIK |
| J693M2S2L-5Vk | 371 | EIVLTQSPDFQSVTPKEKVTITCRASQSIGSSLH |
| | | WYQQKPDQSPKLLIKYGSQSISGVPSRFSGSGSG |
| | | TDFTLTINSLEAEDAATYYCHQNWSLPLPTFGQG |
| | | TKVEIK |
| J693M2S2L-62Vk | 372 | EIVLTQSPDFQSVTPKEKVTITCRASQRIGTSLH |
| | | WYQQKPDQSPKLLIKYASQSKSGVPSRFSGSGSG |
| | | TDFTLTINSLEAEDAATYYCHQSSCSPTPTFGQG |
| | | TKVEIK |
| J693M2S2L-64Vk | 373 | EIVLTQSPDFQSVTPKEKVTITCRASQSIGGSLH |
| | | WYQQKPDQSPKLLIKYGSQSISGVPSRFSGSGSG |
| | | TDFTLTINSLEAEDAATYYCHQRCVSPSPTFGQG |
| | | TKVEIK |
| J693M2S2L-65Vk | 374 | EIVLTQSPDFQSVTPKEKVTITCRASQSIGGTLH |
| | | WYQQKPDQSPKLLIKYASQSISGVPSRFSGSGSG |
| | | TDFTLTINSLEAEDAATYYCHQSSSSPARTFGQG |
| | | TKVEIK |
| J693M2S2L-66Vk | 375 | EIVLTQSPDFQSVTPKEKVTITCRASQSIGSSLH |
| | | WYQQKPDQSPKLLIKYASQSISGVPSRFSGSGSG |
| | | TDFTLTINSLEAEDAATYYCHQCGSSPLHTFGQG |
| | | TKVEIK |
| J693M2S2L-67Vk | 376 | EIVLTQSPDFQSVTPKEKVTITCRASQSIGTSLH |
| | | WYQQKPDQSPKLLIKHPSQSLSGVPSRFSGSGSG |
| | | TDFTLTINSLEAEDAATYYCHQSTSSPPPTFGQG |
| | | TKVEIK |
| J693M2S2L-68Vk | 377 | EIVLTQSPDFQSVTPKEKVTITCRASQNIGSSLH |
| | | WYQQKPDQSPKLLIKHASQSISGVPSRFSGSGSG |
| | | TDFTLTINSLEAEDAATYYCHQNSGLPLPTFGQG |
| | | TKVEIK |
| J693M2S2L-69Vk | 378 | EIVLTQSPDFQSVTPKEKVTITCRASQSIGRRLH |
| | | WYQQKPDQSPKLLIKYASQSISGVPSRFSGSGSG |
| | | TDFTLTINSLEAEDAATYYCHQGSSSPSPTFGQG |
| | | TKVEIK |
| J693M2S2L-6Vk | 379 | EIVLTQSPDFQSVTPKEKVTITCRASQRIGGNLH |
| | | WYQQKPDQSPKLLIKHESQSNSGVPSRFSGSGSG |
| | | TDFTLTINSLEAEDAATYYCHQSSSLPSHTFGQG |
| | | TKVEIK |
| J693M2S2L-70Vk | 380 | EIVLTQSPDFQSVTPKEKVTITCRASQSIGSSLH |
| | | WYQQKPDQSPKLLIKYASQSTSGVPSRFSGSGSG |
| | | TDFTLTINSLEAEDAATYYCHQCSSSPSHTFGQG |
| | | TKVEIK |
| J693M2S2L-71Vk | 381 | EIVLTQSPDFQSVTPKEKVTITCRASQSIGSSLH |
| | | WYQQKPDQSPKLLIKHASQSMSGVPSRFSGSGSG |
| | | TDFTLTINSLEAEDAATYYCHQSRNSPPTTFGQG |
| | | TKVEIK |
| J693M2S2L-72Vk | 382 | EIVLTQSPDFQSVTPKEKVTITCRASQRIGSRLH |
| | | WYQQKPDQSPKLLIKHGSQSISGVPSRFSGSGSG |
| | | TDFTLTINSLEAEDAATYYCHQNSSSPPPTFGQG |
| | | TKVEIK |
| J693M2S2L-74Vk | 383 | EIVLTQSPDFQSVTPKEKVTITCRASQNIGSSLH |
| | | WYQQKPDQSPKLLIKYASQSLSGVPSRFSGSGSG |
| | | TDFTLTINSLEAEDAATYYCHQSSLLPAPTFGQG |
| | | TKVEIK |
| J693M2S2L-75Vk | 384 | EIVLTQSPDFQSVTPKEKVTITCRASQIIGTTLH |
| | | WYQQKPDQSPKLLIKHASQSISGVPSRFSGSGSG |
| | | TDFTLTINSLEAEDAATYYCHQNSNLPPSTFGQG |
| | | TKVEIK |
| J693M2S2L-76Vk | 385 | EIVLTQSPDFQSVTPKEKVTITCRASQNIGGNLH |
| | | WYQQKPDQSPKLLIKHASQSLSGVPSRFSGSGSG |
| | | TDFTLTINSLEAEDAATYYCHQSSNLPPPTFGQG |
| | | TKVEIK |
| J693M2S2L-77Vk | 386 | EIVLTQSPDFQSVTPKEKVTITCRASQGIGGSLH |
| | | WYQQKPDQSPKLLIKYASQSTSGVPSRFSGSGSG |
| | | TDFTLTINSLEAEDAATYYCHQSACLPTRTFGQG |
| | | TKVEIK |
| J693M2S2L-78Vk | 387 | EIVLTQSPDFQSVTPKEKVTITCRASQSIGTSLH |
| | | WYQQKPDQSPKLLIKYASQSVSGVPSRFSGSGSG |
| | | TDFTLTINSLEAEDAATYYCHQIGSLPPPTFGQG |
| | | TKVEIK |
| J693M2S2R-13Vk | 388 | EIVLTQSPDFQSVTPKEKVTITCRASQSIGRSLH |
| | | WYQQKPDQSPKLLIKHASQSVSGVPSRFSGSGSG |
| | | TDFTLTINSLEAEDAATYYCHQNSRLPPPTFGQG |
| | | TKVEIK |
| J693M2S2R-14Vk | 389 | EIVLTQSPDFQSVTPKEKVTITCRASQSIGSSLH |
| | | WYQQKPDQSPKLLIKHNSQSISGVPSRFSGSGSG |
| | | TDFTLTINSLEAEDAATYYCHQRSSSPPLTFGQG |
| | | TKVEIK |
| J693M2S2R-15Vk | 390 | EIVLTQSPDFQSVTPKEKVTITCRASQSIGRNLH |
| | | WYQQKPDQSPKLLIKHVSQSISGVPSRFSGSGSG |
| | | TDFTLTINSLEAEDAATYYCHQRSRSPPSTFGQG |
| | | TKVEIK |
| J693M2S2R-16Vk | 391 | EIVLTQSPDFQSVTPKEKVTITCRASQSIGSSLH |
| | | WYQQKPDQSPKLLIKHASQSVSGVPSRFSGSGSG |
| | | TDFTLTINSLEAEDAATYYCHQCSSLPAPTFGQG |
| | | TKVEIK |
| J693M2S2R-17Vk | 392 | EIVLTQSPDFQSVTPKEKVTITCRASQRIGSSLH |
| | | WYQQKPDQSPKLLIKHASQSLSGVPSRFSGSGSG |
| | | TDFTLTINSLEAEDAATYYCHQSSRLPPQTFGQG |
| | | TKVEIK |
| J693M2S2R-18Vk | 393 | EIVLTQSPDFQSVTPKEKVTITCRASQCIGSRLH |
| | | WYQQKPDQSPKLLIKYASQSISGVPSRFSGSGSG |
| | | TDFTLTINSLEAEDAATYYCHQRGRLPPRTFGQG |
| | | TKVEIK |
| J693M2S2R-19Vk | 394 | EIVLTQSPDFQSVTPKEKVTITCRASQSIGSSLH |
| | | WYQQKPDQSPKLLIKYASQSISGVPSRFSGSGSG |
| | | TDFTLTINSLEAEDAATYYCHQSTSLPRLTFGQG |
| | | TKVEIK |
| J693M2S2R-20Vk | 395 | EIVLTQSPDFQSVTPKEKVTITCRASQIIGSSLH |
| | | WYQQKPDQSPKLLIKYASQSISGVPSRFSGSGSG |
| | | TDFTLTINSLEAEDAATYYCHQSRSSPQQTFGQG |
| | | TKVEIK |
| J693M2S2R-21Vk | 396 | EIVLTQSPDFQSVTPKEKVTITCRASQSIGSTLH |
| | | WYQQKPDQSPKLLIKHASQSISGVPSRFSGSGSG |
| | | TDFTLTINSLEAEDAATYYCHQSSSLPPPTFGQG |
| | | TKVEIK |
| J693M2S2R-22Vk | 397 | EIVLTQSPDFQSVTPKEKVTITCRASQSIGNSLH |
| | | WYQQKPDQSPKLLIKHGSQSISGVPSRFSGSGSG |
| | | TDFTLTINSLEAEDAATYYCHQRRSSPRHTFGQG |
| | | TKVEIK |
| J693M2S2R-27Vk | 398 | EIVLTQSPDFQSVTPKEKVTITCRASQRIGRRLH |
| | | WYQQKPDQSPKLLIKHASQSISGVPSRFSGSGSG |
| | | TDFTLTINSLEAEDAATYYCHQSIGSPPLTFGQG |
| | | TKVEIK |
| J693M2S2R-29Vk | 399 | EIVLTQSPDFQSVTPKEKVTITCRASQSIGRGLH |
| | | WYQQKPDQSPKLLIKYGSQSMSGVPSRFSGSGSG |
| | | TDFTLTINSLEAEDAATYYCHQSSSLPPPTFGQG |
| | | TKVEIK |
| J693M2S2R-2Vk | 400 | EIVLTQSPDFQSVTPKEKVTITCRASQSIGCSLH |
| | | WYQQKPDQSPKLLIKYASQSISGVPSRFSGSGSG |
| | | TDFTLTINSLEAEDAATYYCHQCTSLPLPTFGQG |
| | | TKVEIK |
| J693M2S2R-30Vk | 401 | EIVLTQSPDFQSVTPKEKVTITCRASQGIGSSLH |
| | | WYQQKPDQSPKLLIKYVSQSISGVPSRFSGSGSG |
| | | TDFTLTINSLEAEDAATYYCHQGSSLPTPTFGQG |
| | | TKVEIK |
| J693M2S2R-31Vk | 402 | EIVLTQSPDFQSVTPKEKVTITCRASQSIGTSLH |
| | | WYQQKPDQSPKLLIKHASQSSSGVPSRFSGSGSG |
| | | TDFTLTINSLEAEDAATYYCHQSSRLPPLTFGQG |
| | | TKVEIK |
| J693M2S2R-32Vk | 403 | EIVLTQSPDFQSVTPKEKVTITCRASQVIGGVLH |
| | | WYQQKPDQSPKLLIKYTSQSISGVPSRFSGSGSG |
| | | TDFTLTINSLEAEDAATYYCHQSSSSPRPTFGQG |
| | | TKVEIK |
| J693M2S2R-33Vk | 404 | EIVLTQSPDFQSVTPKEKVTITCRASQSIGSSLH |
| | | WYQQKPDQSPKLLIKHSSQSLSGVPSRFSGSGSG |
| | | TDFTLTINSLEAEDAATYYCHQRSNSPHRTFGQG |
| | | TKVEIK |
| J693M2S2R-36Vk | 405 | EIVLTQSPDFQSVTPKEKVTITCRASQSIGRTLH |
| | | WYQQKPDQSPKLLIKYASQSISGVPSRFSGSGSG |
| | | TDFTLTINSLEAEDAATYYCHQCSISPQPTFGQG |
| | | TKVEIK |
| J693M2S2R-37Vk | 406 | EIVLTQSPDFQSVTPKEKVTITCRASQRIGNTLH |
| | | WYQQKPDQSPKLLIKYPSQSISGVPSRFSGSGSG |
| | | TDFTLTINSLEAEDAATYYCHQSGSSPPPTFGQG |
| | | TKVEIK |
| J693M2S2R-39Vk | 407 | EIVLTQSPDFQSVTPKEKVTITCRASQSIGSRLH |
| | | WYQQKPDQSPKLLIKYISQSMSGVPSRFSGSGSG |
| | | TDFTLTINSLEAEDAATYYCHQSCGLPPPTFGQG |
| | | TKVEIK |
| J693M2S2R-3Vk | 408 | EIVLTQSPDFQSVTPKEKVTITCRASQNIGTRLH |
| | | WYQQKPDQSPKLLIKYGSQSLSGVPSRFSGSGSG |
| | | TDFTLTINSLEAEDAATYYCHQSRISPPPTFGQG |
| | | TKVEIK |
| J693M2S2R-40Vk | 409 | EIVLTQSPDFQSVTPKEKVTITCRASQSIGSTLH |
| | | WYQQKPDQSPKLLIKYVSQSISGVPSRFSGSGSG |
| | | TDFTLTINSLEAEDAATYYCHQCSRLPPPTFGQG |
| | | TKVEIK |
| J693M2S2R-44Vk | 410 | EIVLTQSPDFQSVTPKEKVTITCRASQSIGSRLH |
| | | WYQQKPDQSPKLLIKYASQSTSGVPSRFSGSGSG |
| | | TDFTLTINSLEAEDAATYYCHQSSNLPSPTFGQG |
| | | TKVEIK |
| J693M2S2R-45Vk | 411 | EIVLTQSPDFQSVTPKEKVTITCRASQSIGSNLH |
| | | WYQQKPDQSPKLLIKHASQSMSGVPSRFSGSGSG |
| | | TDFTLTINSLEAEDAATYYCHQSSSLPRPTFGQG |
| | | TKVEIK |
| J693M2S2R-46Vk | 412 | EIVLTQSPDFQSVTPKEKVTITCRASQIIGSSLH |
| | | WYQQKPDQSPKLLIKYASQSISGVPSRFSGSGSG |
| | | TDFTLTINSLEAEDAATYYCHQSISSPSPTFGQG |
| | | TKVEIK |
| J693M2S2R-47Vk | 413 | EIVLTQSPDFQSVTPKEKVTITCRASQSIGSSLH |
| | | WYQQKPDQSPKLLIKYASQSFSGVPSRFSGSGSG |
| | | TDFTLTINSLEAEDAATYYCHQSNCLPPPTFGQG |
| | | TKVEIK |
| J693M2S2R-48Vk | 414 | EIVLTQSPDFQSVTPKEKVTITCRASQSIGKSLH |
| | | WYQQKPDQSPKLLIKHESQSISGVPSRFSGSGSG |
| | | TDFTLTINSLEAEDAATYYCHQANSLPPPTFGQG |
| | | TKVEIK |
| J693M2S2R-4Vk | 415 | EIVLTQSPDFQSVTPKEKVTITCRASQSIGRRLH |
| | | WYQQKPDQSPKLLIKYASQSISGVPSRFSGSGSG |
| | | TDFTLTINSLEAEDAATYYCHQCSSSPPSTFGQG |
| | | TKVEIK |
| J693M2S2R-52Vk | 416 | EIVLTQSPDFQSVTPKEKVTITCRASQIIGHSLH |
| | | WYQQKPDQSPKLLIKHASQSILGVPSRFSGSGSG |
| | | TDFTLTINSLEAEDAATYYCHQSIKSPPATFGQG |
| | | TKVEIK |
| J693M2S2R-54Vk | 417 | EIVLTQSPDFQSVTPKEKVTITCRASQSIGTSLH |
| | | WYQQKPDQSPKLLIKHTSQSKSGVPSRFSGSGSG |
| | | TDFALTINSLEAEDAATYYCHQSSNSPRYTFGQG |
| | | TKVEIK |
| J693M2S2R-55Vk | 418 | EIVLTQSPDFQSVTPKEKVTITCRASQSIGSSLH |
| | | WYQQKPDQSPKLLIKHASQSHSGVPSRFSGSGSG |
| | | TDFTLTINSLEAEDAATYYCHQSGGSPPWTFGQG |
| | | TKVEIK |
| J693M2S2R-56Vk | 419 | EIVLTQSPDFQSVTPKEKVTITCRASQGIGRSLH |
| | | WYQQKPDQSPKLLIKYASQSLSGVPSRFSGSGSG |
| | | TDFTLTINSLEAEDAATYYCHQSNRSPPPTFGQG |
| | | TKVEIK |
| J693M2S2R-5Vk | 420 | EIVLTQSPDFQSVTPKEKVTITCRASQSIGTTLH |
| | | WYQQKPDQSPKLLIKHVSQSTSGVPSRFSGSGSG |
| | | TDFTLTINSLEAEDAATYYCHQSSSLPHPTFGQG |
| | | TKVEIK |
| J693M2S2R-60Vk | 421 | EIVLTQSPDFQSVTPKEKVTITCRASQIIGSSLH |
| | | WYQQKPDQSPKLLIKYPSQSTSGVPSRFSGSGSG |
| | | TDFTLTINSLEAEDAATYYCHQSWSSPLMTFGQG |
| | | TKVEIK |
| J693M2S2R-61Vk | 422 | EIVLTQSPDFQSVTPKEKVTITCRASQSIGNTLH |
| | | WYQQKPDQSPKLLIKHASQSISGVPSRFSGSGSG |
| | | TDFTLTINSLEAEDAATYYCHQSSSSPPPTFGQG |
| | | TKVEIK |
| J693M2S2R-62Vk | 423 | EIVLTQSPDFQSVTPKEKVTITCRASQRIGICLH |
| | | WYQQKPDQSPKLLIKYASQSMSGVPSRFSGSGSG |
| | | TDFTLTINSLEAEDAATYYCHQGFSLPPATFGQG |
| | | TKVEIK |
| J693M2S2R-63Vk | 424 | EIVLTQSPDFQSVTPKEKVTITCRASQSIGSCLH |
| | | WYQQKPDQSPKLLIKYPSQSTSGVPSRFSGSGSG |
| | | TDFTLTINSLEAEDAATYYCHQGSCSPTTTFGQG |
| | | TKVEIK |
| J693M2S2R-64Vk | 425 | EIVLTQSPDFQSVTPKEKVTITCRASQRIGNTLH |
| | | WYQQKPDQSPKLLIKYPSQSISGVPSRFSGSGSG |
| | | TDFTLTINSLEAEDAATYYCHQSGSSPPPTFGQG |
| | | TKVEIK |
| J693M2S2R-65Vk | 426 | EIVLTQSPDFQSVTPKEKVTITCRASQTIGTSLH |
| | | WYQQKPDQSPKLLIKYASQSTSGVPSRFSGSGSG |
| | | TDFTLTINSLEAEDAATYYCHQRCSLPPPTFGQG |
| | | TKVEIK |
| J693M2S2R-68Vk | 427 | EIVLTQSPDFQSVTPKEKVTITCRASQSIGGSLH |
| | | WYQQKPDQSPKLLIKYASQSHSGVPSRFSGSGSG |
| | | TDFTLTINSLEAEDAATYYCHQCRISPRPTFGQG |
| | | TKVEIK |
| J693M2S2R-69Vk | 428 | EIVLTQSPDFQSVTPKEKVTITCRASQRIGSSLH |
| | | WYQQKPDQSPKLLIKHPSQSKSGVPSRFSGSGSG |
| | | TDFTLSINSLEAEDAATYYCHQTSRSPLHTFGQG |
| | | TKVEIK |
| J693M2S2R-6Vk | 429 | EIVLTQSPDFQSVTPKEKVTITCRASQNIGKNLH |
| | | WYQQKPDQSPKLLIKYPSQSISGVPSRFSGSGSG |
| | | TDFTLTINSLEAEDAATYYCHQSRSSPLSTFGQG |
| | | TKVEIK |
| J693M2S2R-70Vk | 430 | EIVLTQSPDFQSVTPKEKVTITCRASQSIGSRLH |
| | | WYQQKPDQSPKLLIKYMSQSISGVPSRFSGSGSG |
| | | TDFTLTINSLEAEDAATYYCHQSRVLPPPTFGQG |
| | | TKVEIK |
| J693M2S2R-71Vk | 431 | EIVLTQSPDFQSVTPKEKVTITCRASQSIGSSLH |
| | | WYQQKPDQSPKLLIKYGSQSISGVPSRFSGSGSG |
| | | TDFTLTINSLEAEDAATYYCHQSSISPRRTFGQG |
| | | TKVEIK |
| J693M2S2R-72Vk | 432 | EIVLTQSPDFQSVTPKEKVTITCRASQTIGRSLH |
| | | WYQQKPDQSPKLLIKYASQSISGVPSRFSGSGSG |
| | | TDFTLTINSLEAEDAATYYCHQRKSSPTPTFGQG |
| | | TKVEIK |
| J693M2S2R-75Vk | 433 | EIVLTQSPDFQSVTPKEKVTITCRASQRIGRQLH |
| | | WYQQKPDQSPKLLIKHPSQSISGVPSRFSGSGSG |
| | | TDFTLTINSLEAEDAATYYCHQSSSLPPQTFGQG |
| | | TKVEIK |
| J693M2S2R-77Vk | 434 | EIVLTQSPDFQSVTPKEKVTITCRASQSIGSSLH |
| | | WYQQKPDQSPKLLIKHTSQSISGVPSRFSGSGSG |
| | | TDFTLTINSLEAEDAATYYCHQICRSPSPTFGQG |
| | | TKVEIK |
| J693M2S2R-78Vk | 435 | EIVLTQSPDFQSVTPKEKVTITCRASQSIGSSLH |
| | | WYQQKPDQSPKLLIKYASQSSSGVPSRFSGSGSG |
| | | TDFTLTINSLEAEDAATYYCHQSSGSPAPTFGQG |
| | | TKVEIK |
| J693M2S2R-79Vk | 436 | EIVLTQSPDFQSVTPKEKVTITCRASQSIGSSLH |
| | | WYQQKPDQSPKLLIKYSSQSTSGVPSRFSGSGSG |
| | | TDFTLTINSLEAEDAATYYCHQISSSPPPTFGQG |
| | | TKVEIK |
| J693M2S2R-7Vk | 437 | EIVLTQSPDFQSVTPKEKVTITCRASQTIGNSLH |
| | | WYQQKPDQSPKLLIKHASQSNSGVPSRFSGSGSG |
| | | TDFTLTINSLEAEDAATYYCHQTMTSPPPTFGQG |
| | | TKVEIK |
| J693M2S2R-80Vk | 438 | EIVLTQSPDFQSVTPKEKVTITCRASQSIGSSLH |
| | | WYQQKPDQSPKLLIKHASQSISGVPSRFSGSGSG |
| | | TDFTLTINSLEAEDAATYYCHQSRSSPSPTFGQG |
| | | TKVEIK |
| J693M2S2R-81Vk | 439 | EIVLTQSPDFQSVTPKEKVTITCRASQSIGSSLH |
| | | WYQQKPDQSPKLLIKHASQSISGVPSRFSGSGSG |
| | | TDFTLTINSLEAEDAATYYCHQRRWSPPPTFGQG |
| | | TKVEIK |
| J693M2S2R-82Vk | 440 | EIVLTQSPDFQSVTPKEKVTITCRASQSIGSSLH |
| | | WYQQKPDQSPKLLIKYASQSNSGVPSRFSGSGSG |
| | | TDFTLTINSLEAEDAATYYCHQISCLPLPTFGQG |
| | | TKVEIK |
| J693M2S2R-83Vk | 441 | EIVLTQSPDFQSVTPKEKVTITCRASQRIGSSLH |
| | | WYQQKPDQSPKLLIKHASQSISGVPSRFSGSGSG |
| | | TDFTLTINSLEAEDAATYYCHQSISLPPPTFGQG |
| | | TKVEIK |
| J693M2S2R-84Vk | 442 | EIVLTQSPDFQSVTPKEKVTITCRASQSIGRNLH |
| | | WYQQKPDQSPKLLIKHTSQSLSGVPSRFSGSGSG |
| | | TDFTLTINSLEAEDAATYYCHQTSTLPPQTFGQG |
| | | TKVEIK |
| J693M2S2R-85Vk | 443 | EIVLTQSPDFQSVTPKEKVTITCRASQSIGRSLH |
| | | WYQQKPDQSPKLLIKYASQSISGVPSRFSGSGSG |
| | | TDFTLTINSLEAEDAATYYCHQSRNSPQPTFGQG |
| | | TKVEIK |
| J693M2S2R-86Vk | 444 | EIVLTQSPDFQSVTPKEKVTITCRASQSIGTRLH |
| | | WYQQKPDQSPKLLIKYVSQSISGVPSRFSGSGSG |
| | | TDFTLTINSLEAEDAATYYCHQSSHSPPPTFGQG |
| | | TKVEIK |
| J693M2S2R-87Vk | 445 | EIVLTQSPDFQSVTPKEKVTITCRASQSIGSCLH |
| | | WYQQKPDQSPKLLIKHRSQSISGVPSRFSGSGSG |
| | | TDFTLTINSLEAEDAATYYCHQWSSSPPPTFGQG |
| | | TKVEIK |
| J693M2S2R-89Vk | 446 | EIVLTQSPDFQSVTPKEKVTITCRASQRIGSSLH |
| | | WYQQKPDQSPKLLIKHPSQSISGVPSRFSGSGSG |
| | | TDFTLTINSLEAEDAATYYCHQTSGSPSHTFGQG |
| | | TKVEIK |
| J693M2S2R-8Vk | 447 | EIVLTQSPDFQSVTPKEKVTITCRASQGIGSSLH |
| | | WYQQKPDQSPKLLIKYESQSISGVPSRFSGSGSG |
| | | TDFTLTINSLEAEDAATYYCHQSSSSPPPTFGQG |
| | | TKVEIK |
| J693M2S2R-90Vk | 448 | EIVLTQSPDFQSVTPKEKVTITCRASQSIGSSLH |
| | | WYQQKPDQSPKLLIKHDSQSISGVPSRFSGSGSG |
| | | TDFTLTINSLEAEDAATYYCHQGSSSPPTTFGQG |
| | | TKVEIK |
| J693M2S2R-91Vk | 449 | EIVLTQSPDFQSVTPKEKVTITCRASQTIGSNLH |
| | | WYQQKPDQSPKLLIKHASQSISGVPSRFSGSGSG |
| | | TDFTLTINSLEAEDAATYYCHQRISSPPSTFGQG |
| | | TKVEIK |
| J693M2S2R-92Vk | 450 | EIVLTQSPDFQSVTPKEKVTITCRASQTIGSSLH |
| | | WYQQKPDQSPKLLIKHASQSVSGVPSRFSGSGSG |
| | | TDFTLTINSLEAEDAATYYCHQSCSSPPSTFGQG |
| | | TKVEIK |
| J693M2S2R-93Vk | 451 | EIVLTQSPDFQSVTPKEKVTITCRASQTIGSSLH |
| | | WYQQKPDQSPKLLIKYVSQSLSGVPSRFSGSGSG |
| | | TDFTLTINSLEAEDAATYYCHQTISSPLPTFGQG |
| | | TKVEIK |
| J693M2S2R-95Vk | 452 | EIVLTQSPDFQSVTPKEKVTITCRASQSIGSRLH |
| | | WYQQKPDQSPKLLIKHASQSISGVPSRFSGSGSG |
| | | TDFTLTINSLEAEDAATYYCHQSSCSPAHTFGQG |
| | | TKVEIK |
| J703M1S3-11Vk | 453 | EIVLTQSPDFQSVTPKEKVTITCRDSRCIGSNLH |
| | | WYQQKPDQSPKLLIKHASQSSSGVPSRFSGSGSG |
| | | TDFTLTINSLEAEDAATYYCHQCSSSPPPTFGQG |
| | | TKVEIK |
| J703M1S3-13Vk | 454 | EIVLTQSPDFQSVTPKEKVTITCRASQSIGSTLH |
| | | WYQQKPDQSPKLLIKHASQSNSGVPSRFSGSGSG |
| | | TDFTLTINSLEAEDAATYYCHQSSSLPPPTFGQG |
| | | TKVEIK |
| J703M1S3-16Vk | 455 | EIVLTQSPDFQSVTPKEKVTITCRASQSIGDSLH |
| | | WYQQKPDQSPKLLIKHASQSKSGVPSRFSGSGSG |
| | | TDFTLTINSLEAEDAATYYCHQGSTSPPRTFGQG |
| | | TKVEIK |
| J703M1S3-19Vk | 456 | EIVLTQSPDFQSVTPKEKVTITCRASQSIGSSLH |
| | | WYQQKPDQSPKLLIKHGSQSSSGVPSRFSGSGSG |
| | | TDFTLTINSLEAEDAATYYCHQSWSSPIPTFGQG |
| | | TKVEIK |
| J703M1S3-22Vk | 457 | EIVLTQSPDFQSVTPKEKVTITCRASQSIGSRLH |
| | | WYQQKPDQSPKLLIKYASQSTSGVPSRFSGSGSG |
| | | TDFTLTINSLEAEDAATYYCHQSSNLPSPTFGQG |
| | | TKVEIK |
| J703M1S3-26Vk | 458 | EIVLTQSPDFQSVTPKEKVTITCRASQSIGSRLH |
| | | WYQQKPDQSPKLLIKHASQSTSGVPSRFSGSGSG |
| | | TDFTLTINSLEAEDAATYYCHQSGSSPPRTFGQG |
| | | TKVEIK |
| J703M1S3-29Vk | 459 | EIVLTQSPDFQSVTPKEKVTITCRASQSIGSSLH |
| | | WYQQKPDQSPKLLIKHASQSISGVPSRFSGSGSG |
| | | TDFTLTINSLEAEDAATYYCHQRTSSPVRTFGQG |
| | | TKVEIK |
| J703M1S3-2Vk | 460 | EIVLTQSPDFQSVTPKEKVTITCRASQSIGNTLH |
| | | WYQQKPDQSPKLLIKHVSQSVSGVPSRFSGSGSG |
| | | TDFTLTINSLEAEDAATYYCHQKVSSPSPTFGQG |
| | | TKVEIK |
| J703M1S3-30Vk | 461 | EIVLTQSPDFQSVTPKEKVTITCRASQRIGSSLH |
| | | WYQQKPDQSPKLLIKHASQSVSGVPSRFSGSGSG |
| | | TDFTLTINSLEAEDAATYYCHQSRSSPPPTFGQG |
| | | TKVEIK |
| J703M1S3-33Vk | 462 | EIVLTQSPDFQSVTPKEKVTITCRASQSIGSSLH |
| | | WYQQKPDQSPKLLIKHASQSTSGVPSRFSGSGSG |
| | | TDFTLTINSLEAEDAATYYCHQSSSSPPSTFGQG |
| | | TKVEIK |
| J703M1S3-34Vk | 463 | EIVLTQSPDFQSVTPKEKVTITCRASQSIGSSLH |
| | | WYQQKPDQSPKLLIKYASQSISGVPSRFSGSGSG |
| | | TDFTLTINSLEAEDAATYYCHQNSSSPSTTFGQG |
| | | TKVEIK |
| J703M1S3-57Vk | 464 | EIVLTQSPDFQSVTPKEKVTITCRASQCIGSSLH |
| | | WYQQKPDQSPKLLIKHESQSSSGVPSRFSGSGSG |
| | | TDFTLTINSLEAEDAATYYCHQRCTSPSPTFGQG |
| | | TKVEIK |
| J703M1S3-5Vk | 465 | EIVLTQSPDFQSVTPKEKVTITCRASQRIGSSLH |
| | | WYQQKPDQSPKLLIKHPSQSDSGVPSRFSGSGSG |
| | | TDFTLTINSLEAEDAATYYCHQNCSLPLPTFGQG |
| | | TKVEIK |
| J703M1S3-62Vk | 466 | EIVLTQSPDFQSVTPKEKVTITCRASQCIGSSLH |
| | | WYQQKPDQSPKLLIKHASQSTSGVPSRFSGSGSG |
| | | TDFTLTINSLEAEDAATYYCHQGISSPPQTFGQG |
| | | TKVEIK |
| J703M1S3-69Vk | 467 | EIVLTQSPDFQSVTPKEKVTITCRASQSIGSSLH |
| | | WYQQKPDQSPKLLIKHVSQSLSGVPSRFSGSGSG |
| | | TDFTLTINSLEAEDAATYYCHQRSSSPSPTFGQG |
| | | TKVEIK |
| J703M1S3-71Vk | 468 | EIVLTQSPDFQSVTPKEKVTITCRASQSIGSSLH |
| | | WYQQKPDQSPKLLIKHPSQSLSGVPSRFSGSGSG |
| | | TDFTLTINSLEAEDAATYYCHQSIRLPPSTFGQG |
| | | TKVEIK |
| J703M1S3-78Vk | 469 | EIVLTQSPDFQSVTPKEKVTITCRANQSIGGSLH |
| | | WYQQKPDQSPKLLIKHASQSKSGVPSRFSGSGSG |
| | | TDFTLTINSLEAEDAATYYCHQDSRSPTRTFGQG |
| | | TKVEIK |
| J703M1S3-79Vk | 470 | EIVLTQSPDFQSVTPKEKVTITCRASQSIGSGLH |
| | | WYQQKPDQSPKLLIKHTSQSISGVPSRFSGSGSG |
| | | TDFTLTINSLEAEDAATYYCHQSSSLPHPTFGQG |
| | | TKVEIK |
| J703M1S3-7Vk | 471 | EIVLTQSPDFQSVTPKEKVTITCRASQSIGSSLH |
| | | WYQQKPDQSPKLLIKHASQSTSGVPSRFSGSGSG |
| | | TDFTLTINSLEAEDAATYYCHQSSSSPTPTFGQG |
| | | TKVEIK |
| J703M1S3-81Vk | 472 | EIVLTQSPDFQSVTPKEKVTITCRASQSIGSRLH |
| | | WYQQKPDQSPKLLIKYPSQSRSGVPSRFSGSGSG |
| | | TDLTLTINSLEAEDAATYYCHQNGSLPPPTFGQG |
| | | TKVEIK |
| J703M1S3-82Vk | 473 | EIVLTQSPDFQSVTPKEKVTITCRASQSIGSSLH |
| | | WYQQKPDQSPKLLIKHASQSISGVPSRFSGSGSG |
| | | TDFTLTINSLEAEDAATYYCHQNSSSPPPTFGQG |
| | | TKVEIK |
| J703M1S3-86Vk | 474 | EIVLTQSPDFQSVTPKEKVTITCRASQSIGSALH |
| | | WYQQKPDQSPKLLIKHASQSLSGVPSRFSGSGSG |
| | | TDFTLTINSLEAEDAATYYCHQSSILPRPTFGQG |
| | | TKVEIK |
| J703M1S3-90Vk | 475 | EIVLTQSPDFQSVTPKEKVTITCRASQSIGSNLH |
| | | WYQQKPDQSPKLLIKHASQSISGVPSRFSGSGSG |
| | | TDFTLTINSLEAEDAATYYCHQTRTSPPLTFGQG |
| | | TKVEIK |
| J703M1S3-93Vk | 476 | EIVLTQSPDFQSVTPKEKVTITCRASQKIGSSLH |
| | | WYQQKPDQSPKLLIKYGSQSTSGVPSRFSGSGSG |
| | | TDFTLTINSLEAEDAATYYCHQCISLPTPTFGQG |
| | | TKVEIK |
| J703M1S3-94Vk | 477 | EIVLTQSPDFQSVTPKEKVAITCRASQRIGSSLH |
| | | WYQQKPDQSPKLLIKYASQSISGVPSRFSGSGSG |
| | | TDFTLTINSLEAEDAATYYCHQNSSLPPPTFGQG |
| | | TKVEIK |

TABLE 13
Amino acid residues observed in affinity matured AE11-5 antibodies
AE11-5 Heavy chain variable region (SEQ ID NO: 1073)

| | |
|---|---|
| AE11-5VH | 1234567890123456789012345678901234567890123456789012a345678901 |
| | EVQLVQSGAEVKKPGSSAKVSCKASGGTFSSYAISWVRQAPGQGLEWMGGIIPILGTANYAQ |
| | V NW TTT WT FRSPI |
| | TY SV M TDAST |
| | GI P L I NGS |
| | AN G V P V |
| | F N I H |
| | R V A |
| | L K R |
| | F M |
| | L |
| | 234567890123456789012abc345678901234567890abc1234567890123 |
| | KFLGRVTITADESTSTVYMELSSLRSEDTAVYYCARGLYYDPTRADYWGQGTLVTVSS |
| | Q A SVFFNTSWF |
| | WIVVEFASM |
| | TFP TRKP |
| | ARH IGRA |
| | Q ADI |
| | Y |
| | V |
| | P |
| | N |
| | G |

AE11-5 Light chain variable region (SEQ ID NO: 1074)

| | |
|---|---|
| AE11-5VL | 1234567890123456789012345678901234567890123456789012345678901 |
| | DIVMTQSPDFHSVTPKEKVTITCRASQSIGSSLHWYQQKPDQSPKLLIRHASQSISGVPSR |
| | E L Q R RR KYV L |
| | T TT P V |
| | N GN T T |
| | I NC G S |
| | C KG S M |
| | G CI E N |
| | K HK D K |
| | Y VM F |
| | W PL R |
| | LY |
| | P |
| | V |
| | 2345678901234567890123456789012345a67890123456a |
| | FSGSGSGTDFTLTIHSLEAEDAATYYCHQSSSSPPPTFGQGTQVEIK |
| | N RRRL LS K |
| | NGI AR |
| | GIC SL |
| | TCG RT |
| | CNN TA |
| | ITT QQ |
| | MK HH |
| | V |
| | M |

TABLE 14
Individual VH sequences from converted clones

| Protein | | | Sequence |
|---|---|---|---|
| region | | SEQ ID NO: | 123456789012345678901234567890 |
| J703M1S3 | | 478 | EVQLVQSGAEVKKPGSSVKVSCKASGGTFS |
| #2 | | | WYATSWVRQAPGQGLEWMGGITPILGSPIY |
| VH | | | AQKFQGRVTITADESTSTVYMELSSLRSED |
| | | | TAVYYCARGVYYDHRRADYWGQGTLVTVSS |
| J703M1S3 | CDR-H1 | Residues 31-35 | WYATS |
| #2 | | of SEQ ID | |
| VH | | NO.: 478 | |
| J703M1S3 | CDR-H2 | Residues 50-66 | GITPILGSPIYAQKFQG |
| #2 | | of SEQ ID | |
| VH | | NO.: 478 | |
| J703M1S3 | CDR-H3 | Residues 99-109 | GVYYDHRRADY |
| #2 | | of SEQ ID | |
| VH | | NO.: 478 | |
| J703M1S3 | | 479 | EVQLVQSGAEVKKPGSSVKVSCKASGGTFS |
| #13 | | | WYAISWVRQAPGQGLEWMGGITPILGAANY |
| VH | | | AQKFQGRVTITADESTSTVYMELSSLRSED |
| | | | TAVYYCARGVYYDPKRADYWGQGTLVTVSS |
| J703M1S3 | CDR-H1 | Residues 31-35 | WYAIS |
| #13 | | of SEQ ID | |
| | | NO.: 479 | |
| J703M1S3 | CDR-H2 | Residues 50-66 | GITPILGAANYAQKFQG |
| #13 | | of SEQ ID | |
| VH | | NO.: 479 | |
| J703M1S3 | CDR-H3 | Residues 99-109 | GVYYDPKRADY |
| #13 | | of SEQ ID | |
| VH | | NO.: 479 | |
| J703M1S3 | | 480 | EVQLVQSGAEVKKPGSSVKVSCKASGGTFS |
| #26 | | | WYAISWVRQAPGQGLEWMGGITPILGTANY |
| VH | | | AQKFQGRVTITADESTSTVYMELSSLRSED |
| | | | TAVYYCARGVYYDPKRADYWGQGTLVTVSS |
| J703M1S3 | CDR-H1 | Residues 31-35 | WYAIS |
| #26 | | of SEQ ID | |
| VH | | NO.: 480 | |
| J703M1S3 | CDR-H2 | Residues 50-66 | GITPILGTANYAQKFQG |
| #26 | | of SEQ ID | |
| VH | | NO.: 480 | |
| J703M1S3 | CDR-H3 | Residues 99-109 | GVYYDPKRADY |
| #26 | | of SEQ ID | |
| VH | | NO.: 480 | |
| J703M1S3 | | 481 | EVQLVQSGAEVKKPGSSVKVSCKASGGTFS |
| #30 | | | WYAISWVRQAPGQGLEWMGGITPILGSPIY |
| VH | | | AQKFQGRVTITADESTSTVYMELSSLRSED |
| | | | TAVYYCARGVYYDPKRADYWGQGTLVTVSS |
| J703M1S3 | CDR-H1 | Residues 31-35 | WYAIS |
| #30 | | of SEQ ID | |
| VH | | NO.: 481 | |
| J703M1S3 | CDR-H2 | Residues 50-66 | GITPILGSPIYAQKFQG |
| #30 | | of SEQ ID | |
| VH | | NO.: 481 | |
| J703M1S3 | CDR-H3 | Residues 99-109 | GVYYDPKRADY |
| #30 | | of SEQ ID | |
| VH | | NO.: 481 | |
| J703M1S3 | | 482 | EVQLVQSGAEVKKPGSSVKVSCKASGGTFS |
| #33 | | | WYPISWVRQAPGQGLEWMGGITPILGAGIY |
| VH | | | AQKFQGRVTITADESTSTVYMELSSLRSED |
| | | | TAVYYCARGVYYDFKRADYWGQGTLVTVSS |
| J703M1S3 | CDR-H1 | Residues 31-35 | WYPIS |
| #33 | | of SEQ ID | |
| VH | | NO.: 482 | |
| J703M1S3 | CDR-H2 | Residues 50-66 | GITPILGAGIYAQKFQG |
| #33 | | of SEQ ID | |
| VH | | NO.: 482 | |
| J703M1S3 | CDR-H3 | Residues 99-109 | GVYYDFKRADY |
| #33 | | of SEQ ID | |
| VH | | NO.: 482 | |
| J703M1S3 | | 483 | EVQLVQSGAEVKKPGSSVKVSCKASGGTFS |
| #35 | | | WYAISWVRQAPGQGLEWMGGITPILGSATY |
| VH | | | AQKFQGRVTITADESTSTVYMELSSLRSED |
| | | | TAVYYCARGIYYDPKRADYWGQGTLVTVSS |
| J703M1S3 | CDR-H1 | Residues 31-35 | WYAIS |
| #35 | | of SEQ ID | |
| VH | | NO.: 483 | |
| J703M1S3 | CDR-H2 | Residues 50-66 | GITPILGSATYAQKFQG |
| #35 | | of SEQ ID | |
| VH | | NO.: 483 | |
| J703M1S3 | CDR-H3 | Residues 99-109 | GIYYDPKRADY |
| #35 | | of SEQ ID | |
| VH | | NO.: 483 | |
| J703M1S3 | | 484 | EVQLVQSGAEVKKPGSSVKVSCKASGGTFS |
| #38 | | | WYAISWVRQAPGQGLEWMGGITPILGTPIY |
| VH | | | AQKFQGRVTITADESTSTVYMELSSLRSED |
| | | | TAVYYCARGVYYDFKRADYWGQGTLVTVSS |
| J703M1S3 | CDR-H1 | Residues 31-35 | WYAIS |
| #38 | | of SEQ ID | |
| VH | | NO.: 484 | |
| J703M1S3 | CDR-H2 | Residues 50-66 | GITPILGTPIYAQKFQG |
| #38 | | of SEQ ID | |
| VH | | NO.: 484 | |
| J703M1S3 | CDR-H3 | Residues 99-109 | GVYYDFKRADY |
| #38 | | of SEQ ID | |
| VH | | NO.: 484 | |
| J703M1S3 | | 485 | EVQLVQSGAEVKKPGSSVKVSCKASGGTFS |
| #69 | | | WYAISWVRQAPGQGLEWMGGITPILGSPIY |
| VH | | | AQKFQGRVTITADESTSTVYMELSSLRSED |
| | | | TAVYYCARGIYYDPKRADYWGQGTLVTVSS |
| J703M1S3 | CDR-H1 | Residues 31-35 | WYAIS |
| #69 | | of SEQ ID | |
| VH | | NO.: 485 | |
| J703M1S3 | CDR-H2 | Residues 50-66 | GITPILGSPIYAQKFQG |
| #69 | | of SEQ ID | |
| VH | | NO.: 485 | |
| J703M1S3 | CDR-H3 | Residues 99-109 | GIYYDPKRADY |
| #69 | | of SEQ ID | |
| VH | | NO.: 485 | |
| J703M1S3 | | 486 | EVQLVQSGAEVKKPGSSVKVSCKASGGTFS |
| #90 | | | WYAISWVRQAPGQGLEWMGGITPILGSPIY |
| VH | | | AQKFQGRVTITADESTSTVYMELSSLRSED |
| | | | TAVYYCARGVYYDYKRADYWGQGTLVTVSS |
| J703M1S3 | CDR-H1 | Residues 31-35 | WYAIS |
| #90 | | of SEQ ID | |
| VH | | NO.: 486 | |
| J703M1S3 | CDR-H2 | Residues 50-66 | GITPILGSPIYAQKFQG |
| #90 | | of SEQ ID | |
| VH | | NO.: 486 | |
| J703M1S3 | CDR-H3 | Residues 99-109 | GVYYDYKRADY |
| #90 | | of SEQ ID | |
| VH | | NO.: 486 | |

TABLE 15
Individual clones VL sequences

| Protein | | | Sequence |
|---|---|---|---|
| region | | | 123456789012345678901234567890 |
| J703M1S3 | | 487 | EIVLTQSPDFQSVTPKEKVTITCRASQSIG |
| #2 | | | NTLHWYQQKPDQSPKLLIKHVSQSVSGVPS |
| VL | | | RFSGSGSGTDFTLTINSLEAEDAATYYCHQ |
| | | | KVSSPSPTFGQGTKVEIK |
| J703M1S3 | CDR-L1 | Residues 24-34 | RASQSIGNTLH |
| #2 | | of SEQ ID | |
| VL | | NO.: 487 | |
| J703M1S3 | CDR-L2 | Residues 50-56 | HVSQSVS |
| #2 | | of SEQ ID | |
| VL | | NO.: 487 | |
| J703M1S3 | CDR-L3 | Residues 89-98 | HQKVSSPSPT |
| #2 | | of SEQ | |
| VL | | ID NO.: 487 | |
| J703M1S3 | | 488 | EIVLTQSPDFQSVTPKEKVTITCRASQSIG |
| #13 | | | STLHWYQQKPDQSPKLLIKHASQSNSGVPS |
| VL | | | RFSGSGSGTDFTLTINSLEAEDAATYYCHQ |
| | | | SSSLPPPTFGQGTKVEI |
| J703M1S3 | CDR-L1 | Residues 24-34 | RASQSIGSTLH |
| #13 | | of SEQ ID | |
| VL | | NO.: 488 | |
| J703M1S3 | CDR-L2 | Residues 50-56 | HASQSNS |
| #13 | | of SEQ ID | |
| VL | | NO.: 488 | |
| J703M1S3 | CDR-L3 | Residues 89-98 | HQSSSLPPPT |
| #13 | | of SEQ | |
| VL | | ID NO.: 488 | |
| J703M1S3 | | 489 | EIVLTQSPDFQSVTPKEKVTITCRASQSIG |
| #26 | | | SRLHWYQQKPDQSPKLLIKHASQSTSGVPS |
| VL | | | RFSGSGSGTDFTLTINSLEAEDAATYYCHQ |
| | | | SGSSPPRTFGQGTKVEIK |
| J703M1S3 | CDR-L1 | Residues 24-34 | RASQSIGSRLH |
| #26 | | of SEQ ID | |
| VL | | NO.: 489 | |
| J703M1S3 | CDR-L2 | Residues 50-56 | HASQSTS |
| #26 | | of SEQ ID | |
| VL | | NO.: 489 | |
| J703M1S3 | CDR-L3 | Residues 89-98 | HQSGSSPPRT |
| #26 | | of SEQ | |
| VL | | ID NO.: 489 | |
| J703M1S3 | | 490 | EIVLTQSPDFQSVTPKEKVTITCRASQRIG |
| #30 | | | SSLHWYQQKPDQSPKLLIKHASQSVSGVPS |
| VL | | | RFSGSGSGTDFTLTINSLEAEDAATYYCHQ |
| | | | SRSSPPPTFGQGTKVEIK |
| J703M1S3 | CDR-L1 | Residues 24-34 | RASQRIGSSLH |
| #30 | | of SEQ ID | |
| VL | | NO.: 490 | |
| J703M1S3 | CDR-L2 | Residues 50-56 | HASQSVS |
| #30 | | of SEQ ID | |
| VL | | NO.: 490 | |
| J703M1S3 | CDR-L3 | Residues 89-98 | HQSRSSPPPT |
| #30 | | of SEQ | |
| VL | | ID NO.: 490 | |
| J703M1S3 | | 491 | EIVLTQSPDFQSVTPKEKVTITCRASQSIG |
| #33 | | | SSLHWYQQKPDQSPKLLIKHASQSTSGVPS |
| VL | | | RFSGSGSGTDFTLTINSLEAEDAATYYCHQ |
| | | | SSSSPPSTFGQGTKVEIK |
| J703M1S3 | CDR-L1 | Residues 24-34 | RASQSIGSSLH |
| #33 | | of SEQ ID | |
| VL | | NO.: 491 | |
| J703M1S3 | CDR-L2 | Residues 50-56 | HASQSTS |
| #33 | | of SEQ ID | |
| VL | | NO.: 491 | |
| J703M1S3 | CDR-L3 | Residues 89-98 | HQSSSSPPST |
| #33 | | of SEQ | |
| VL | | ID NO.: 491 | |
| J703M1S3 | | 492 | EIVLTQSPDFQSVTPKEKVTITCRASQTIG |
| #35 | | | SSLHWYQQKPDQSPKLLIKHASQSISGVPS |
| VL | | | RFSGSGSGTDFTLTINSLEAEDAATYYCHQ |
| | | | TSSLPTPTFGQGTKVEIK |
| J703M1S3 | CDR-L1 | Residues 24-34 | RASQTIGSSLH |
| #35 | | of SEQ ID | |
| VL | | NO.: 492 | |
| J703M1S3 | CDR-L2 | Residues 50-56 | HASQSIS |
| #35 | | of SEQ ID | |
| VL | | NO.: 492 | |
| J703M1S3 | CDR-L3 | Residues 89-98 | HQTSSLPTPT |
| #35 | | of SEQ | |
| VL | | ID NO.: 492 | |
| J703M1S3 | | 493 | EIVLTQSPDFQSVTPKEKVTITCRASQTIG |
| #38 | | | SSLHWYQQKPDQSPKLLIKHASQSISGVPS |
| VL | | | RFSGSGSGTDFTLTINSLEAEDAATYYCHQ |
| | | | SSSSPPPTFGQGTKVEIK |
| J703M1S3 | CDR-L1 | Residues 24-34 | RASQTIGSSLH |
| #38 | | of SEQ ID | |
| VL | | NO.: 493 | |
| J703M1S3 | CDR-L2 | Residues 50-56 | HASQSIS |
| #38 | | of SEQ ID | |
| VL | | NO.: 493 | |
| J703M1S3 | CDR-L3 | Residues 89-98 | HQSSSSPPPT |
| #38 | | of SEQ | |
| VL | | ID NO.: 493 | |
| J703M1S3 | | 494 | EIVLTQSPDFQSVTPKEKVTITCRASQSIG |
| #69 | | | SSLHWYQQKPDQSPKLLIKHVSQSLSGVPS |
| VL | | | RFSGSGSGTDFTLTINSLEAEDAATYYCHQ |
| | | | RSSSPSPTFGQGTKVEIK |
| J703M1S3 | CDR-L1 | Residues 24-34 | RASQSIGSSLH |
| #69 | | of SEQ ID | |
| VL | | NO.: 494 | |
| J703M1S3 | CDR-L2 | Residues 50-56 | HVSQSLS |
| #69 | | of SEQ ID | |
| VL | | NO.: 494 | |
| J703M1S3 | CDR-L3 | Residues 89-98 | HQRSSSPSPT |
| #69 | | of SEQ | |
| VL | | ID NO.: 494 | |
| J703M1S3 | | 495 | EIVLTQSPDFQSVTPKEKVTITCRASQSIG |
| #90 | | | SNLHWYQQKPDQSPKLLIKHASQSISGVPS |
| VL | | | RFSGSGSGTDFTLTINSLEAEDAATYYCHQ |
| | | | TRTSPPLTFGQGTKVEIK |
| J703M1S3 | CDR-L1 | Residues 24-34 | RASQSIGSNLH |
| #90 | | of SEQ ID | |
| VL | | NO.: 495 | |
| J703M1S3 | CDR-L2 | Residues 50-56 | HASQSIS |
| #90 | | of SEQ ID | |
| VL | | NO.: 495 | |
| J703M1S3 | CDR-L3 | Residues 89-98 | HQTRTSPPLT |
| #90 | | of SEQ | |
| VL | | ID NO.: 495 | |

TABLE 16
AE11-5 affinity matured scFv clones converted to full length IgG

| | | | Full length |
|---|---|---|---|
| ScFv | | | IgG (protein) |
| clone name | HC plasmid | LC plasmid | name |
| J703M1S3#2 | pJP368; pHybE-hCg1,z,non- | pJP369; pHybE-hCk V3- | AE11-5 AM1 |
| | a,mut(234,235)-J703M1S3#2 | J703M1S31#2 | |
| J703M1S3#13 | pJP370; pHybE-hCg1,z,non- | pJP371; pHybE-hCk V3- | AE11-5 AM2 |
| | a,mut(234,235)-J703M1S3#13 | J703M1S3#13 | |
| J703M1S3#26 | pJP372; pHybE-hCg1,z,non- | pJP373; pHybE-hCk V3- | AE11-5 AM3 |
| | a,mut(234,235)-J703M1S3#26 | J703M1S3#26 | |
| J703M1S3#30 | pJP374; pHybE-hCg1,z,non- | pJP375; pHybE-hCk V3- | AE11-5 AM4 |
| | a,mut(234,235)-J703M1S3#30 | J703M1S3#30 | |
| J703M1S3#33 | pJP376; pHybE-hCg1,z,non- | pJP377; pHybE-hCk V3- | AE11-5 AM5 |
| | a,mut(234,235)-J703M1S3#33 | J703M1S3#33 | |
| J703M1S3#35 | pJP378; pHybE-hCg1,z,non- | pJP379; pHybE-hCk V3- | AE11-5 AM6 |
| | a,mut(234,235)-J703M1S3#35 | J703M1S3#35 | |
| J703M1S3#38 | pJP382; pHybE-hCg1,z,non- | pJP383; pHybE-hCk V3- | AE11-5 AM8 |
| | a,mut(234,235)-J703M1S3#38 | J703M1S3#38 | |
| J703M1S3#69 | pJP384; pHybE-hCg1,z,non- | pJP385; pHybE-hCk V3- | AE11-5 AM9 |
| | a,mut(234,235)-J703M1S3#69 | J703M1S3#69 | |
| J703M1S3#90 | pJP386; pHybE-hCg1,z,non- | pJP387; pHybE-hCk V3- | AE11-5 AM10 |
| | a,mut(234,235)-J703M1S3#90 | J703M1S3#90 | |

### 1.3 TNF Enzyme-Linked Immunosorbent Assay Protocol (ELISA) and Assay Result

[0103] The following protocol is used to characterize the binding of TNF antibodies to biotinylated human or cyno TNF by enzyme-linked immunosorbent assay (ELISA). An ELISA plate was coated with 50 μl per well of goat anti human IgG-Fc at 2 μg/ml, overnight at 4° C. The plate was washed 3 times with PBS/Tween. 50 μl Mab diluted to 1 μg/ml in PBS/0.1% BSA was added to appropriate wells and incubated for 1 hour at room temperature (RT). The plate was washed 3 times with PBS/Tween. 50 μl of serial diluted biotin-human TNF was added to appropriate wells and incubated for 1 hour at RT. The plate was washed 3 times with PBS/Tween. 50 μl of streptavidin-HRP diluted 1:10,000 in PBS/0.1% BSA was added to appropriate wells and incubated for 1 hour at RT. The plate was washed 3 times with PBS/Tween. 50 μl of TMB was added to appropriate wells and the reaction was allowed to proceed for 1 minute. The reaction was stopped with 50 μl/well 2N H₂SO₄ and the absorbance read at 450 nm. Results are shown in Table 17.

TABLE 17

| | EC50 in hTNF | EC50 in cynoTNF |
|---|---|---|
| IgG Name | ELISA (nM) | ELISA (nM) |
| AE11-5-AM1 | 1.06 | 2.14 |
| AE11-5-AM2 | 522.5 | >845 |
| AE11-5-AM3 | 1.57 | 1.55 |
| AE11-5-AM4 | 18.32 | 750.3 |
| AE11-5-AM5 | 17.7 | 2.2 |
| AE11-5-AM6 | 1.37 | >720 |
| AE11-5-AM7 | 10.32 | 1.26 |
| AE11-5-AM8 | 250.2 | 58.58 |
| AE11-5-AM9 | 16.72 | 5.29 |
| AE11-5-AM10 | 0.98 | 0.28 |

### 1.4 TNF Neutralization Potency of TNF Antibodies by L929 Bioassay

[0104] Human TNF was prepared at Abbott Bioresearch Center (Worcester, Mass., US) and received from the Biologics Pharmacy. Mouse TNF was prepared at Abbott Bioresearch Center and received from the Biologics Pharmacy. Rat TNF was prepared at Abbott Bioresearch Center and received from the Biologics Pharmacy. Rabbit TNF was purchased from R&D Systems. Rhesus/Macaque TNF (rhTNF) was purchased from R&D Systems. Actinomycin was purchased from Sigma Aldrich and resuspended at a stock concentration of 10 mg/mL in DMSO.

[0105] Assay Media: 10% FBS (Hyclone #SH30070.03), Gibco reagents: RPMI 1640 (#21870), 2 mM L-glutamine (#25030), 50 units/mL penicillin/ 50 μg/mL streptomycin (#15140), 0.1 mM MEM non-essential amino acids (#11140) and 5.5×10⁻⁵ M 2-mercaptoethanol (#21985-023).

[0106] L929 cells were grown to a semi-confluent density and harvested using 0.05% tryspin (Gibco #25300). The cells were washed with PBS, counted, and resuspended at 1E6 cells/mL in assay media containing 4 μg/mL actinomycin D. The cells were seeded in a 96-well plate (Costar #3599) at a volume of 50 μL and 5E4 cells/well. Wells received 50 μL of assay media, bringing the volume to 100 μL.

[0107] A test sample was prepared as follows. The test and control IgG proteins were diluted to a 4× concentration in assay media and serial 1:3 dilutions were performed. TNF species were diluted to the following concentrations in assay media: 400 pg/mL huTNF, 200 pg/mL muTNF, 600 pg/mL ratTNF, and 100 pg/mL rabTNF. Antibody sample (200 μL) was added to the TNF (200 μL) in a 1:2 dilution scheme and allowed to incubate for 0.5 hour at room temperature.

[0108] To measure huTNF neutralization potency in this assay, the antibody/TNF solution was added to the plated cells at 100 μL for a final concentration at 375 nM-0.019 nM. The final concentration of TNF was as follows: 100 pg/mL huTNF, 50 pg/mL muTNF, 150 pg/mL ratTNF, and 25 pg/mL rabTNF. The plates were incubated for 20 hours at 37° C., 5% CO₂. To quantitate viability, 100 μL was removed from the wells and 10 μL of WST-1 reagent (Roche cat #11644807001) was added. Plates were incubated under assay conditions for 3.5 hours, centrifuged at 500×g, and 75 μL of supernatant transferred to an ELISA plate (Costar cat #3369). The plates were read at OD 420-600 nm on a Spectromax 190 ELISA plate reader. The neutralization potency of selected TNF/IL-17 DVD-Ig binding proteins is shown in Table 18.

TABLE 18

| | hu TNF neutralization | rhesus TNF neutralization IC50 |
|---|---|---|
| IgG Name | IC50 (nM) | (nM) |
| AE11-5 AM1 | 0.439 | 0.251 |
| AE11-5 AM2 | 1.241 | 0.756 |
| AE11-5 AM3 | 0.291 | 0.165 |
| AE11-5 AM4 | 0.259 | 0.109 |
| AE11-5 AM5 | 0.968 | 0.613 |
| AE11-5 AM6 | 2.029 | 0.652 |
| AE11-5 AM7 | 0.049 | 0.104 |
| AE11-5 AM8 | 1.356 | 3.040 |
| AE11-5 AM9 | 0.391 | 0.123 |
| AE11-5 AM10 | 0.678 | 0.140 |

### Example 2

### Affinity Maturation of a Humanized Anti-Human TNF Antibody hMAK-195

[0109] The mouse anti-human TNF antibody MAK-195 was humanized and affinity-matured to generate a panel of humanized MAK195 variants that have cross-reactivity to cyno-TNF and improved affinity and binding kinetics against both human and cyno TNF.

[0110] To improve the affinity of hMAK195 to TNF, hypermutated CDR residues were identified from other human antibody sequences in the IgBLAST database that also shared high identity to germlines VH3-53 and IGKV1-39. The corresponding hMAK195 CDR residues were then subjected to limited mutagenesis by PCR with primers having low degeneracy at these positions to create three antibody libraries in the scFv format. The first library contained mutations at residues 31, 32, 33, 35, 50, 52, 53, 54, 56 and 58 in the VH CDR1 and 2 (Kabat numbering); the second library at residues 95 to 100, 100a, 101, and 102 in VH CDR3; and the third library at residues 28, 30, 31, 32, 50, 53, 92, 93, 94, and 95 in the three VL CDRs. To further increase the identity of hMAK195 to the human germline framework sequences, a binary degeneracy at VH positions 60 (D/A), 61 (S/D), 62 (T/S), 63 (L/V), and 65 (S/G) were introduced into the first library. Also, a binary degeneracy at VL positions 24 (K/R), 33 (V/L), 54 (R/L), 55 (H/Q), 56 (T/S), 91 (H/S) and 96 (F/Y) were introduced into the third library.

[0111] These hMAK195 variants were selected against a low concentration of biotinylated TNF for improved on-rate, off-rate, or both were carried out and antibody protein sequences of affinity-modulated hMAK195 were recovered for converting back to IgG for further characterization. All three libraries were selected separately for the ability to bind human or cynomolgus monkey TNF in the presence of decreasing concentrations of biotinylated human or cynomolgus monkey TNF antigens. All mutated CDR sequences recovered from library selections were recombined into additional libraries and the recombined libraries were subjected to more stringent selection conditions before individual antibodies are identified.

[0112] Table 19 provides a list of amino acid sequences of VH and VL of the humanized MAK-195 which were subjected to the affinity maturation selection protocol Amino acid residues of individual CDRs of each VH and VL sequence are indicated in bold.

TABLE 19
List of amino acid sequences of affinity matured hMAK195
VH variants

| | SEQ ID | |
|---|---|---|
| Clone | NO: | VH |
| rHC1_B8 | 496 | EVQLVESGGGLVQPGGSLRLSCAASGFTFSNYGVSWVRQAPGK |
| | | GLEWVSIIRGDGSTDYASTLKSRFTISRDNSKNTLYLQMNSLR |
| | | AEDTAVYYCAREWQHGPVAYWGQGTLVTVSS |
| rHC1_H12 | 497 | EVQLVESGGGLVQPGGSLRLSCAASGFTFSNYGVSWVRQAPGK |
| | | GLEWVSIIRGDGSTDYADSVKSRFTISRDNSKNTLYLQMNSLR |
| | | AEDTAVYYCAREWHHGPVAYWGQGTLVTVSS |
| H1 + H2_E1 | 498 | EVQLVESGGGLVQPGGSLRLSCAASGFTFSAYGVNWVRQAPGK |
| | | GLEWVSIIWGDGATDYADSVKGRFTISRDNSKNTLYLQMNSLR |
| | | AEDTAVYYCAREWHHGPVAYWGQGTLVTVSS |
| rHC1_A2 | 499 | EVQLVESGGGLVQPGGSLRLSCAASGFTFSNYGVNWVRQAPGK |
| | | GLEWVSMISSDGFTDYASSVKSRFTISRDNSKNTLYLQMNSLR |
| | | AEDTAVYYCAREWQHGPVAYWGQGTLVTVSS |
| rHC1_H6 | 500 | EVQLVESGGGLVQPGGSLRLSCAASGFTFSNYGVTWVRQAPGK |
| | | GLEWVSMIAADGSTDYASSVKGRFTISRDNSKNTLYLQMNSLR |
| | | AEDTAVYYCAREWQHGPVAYWGQGTLVTVSS |
| H1 + H2_D7 | 501 | EVQLVESGGGLVQPGGSLRLSCAASGFTFSNYGVTWVRQAPGK |
| | | GLEWVSMIRADGSTDYASSLKSRFTISRDNSKNTLYLQMNSLR |
| | | AEDTAVYYCAREWHHGPVAYWGQGTLVTVSS |
| H1 + H2_D9 | 502 | EVQLVESGGGLVQPGGSLRLSCAASGFTFSNYGVTWVRQAPGK |
| | | GLEWVSMIRDDGSTDYADTVKGRFTISRDNSKNTLYLQMNSLR |
| | | AEDTAVYYCAREWHHGPVAYWGQGTLVTVSS |
| rHC1_A10 | 503 | EVQLVESGGGLVQPGGSLRLSCAASGETFSHIGVSWVRQAPGK |
| | | GLEWVSMISYAGSTDYASTVKGRFTISRDNSKNTLYLQMNSLR |
| | | AEDTAVYYCARLLHKGPIDYWGQGTLVTVSS |
| H1 + H2_A5 | 504 | EVQLVESGGGLVQPGGSLRLSCAASGFTFSDFGVNWVRQAPGK |
| | | GLEWVSMIWSDGSTDYADTVKSRFTISRDNSKNTLYLQMNSLR |
| | | AEDTAVYYCAREWHHGPVAYWGQGTLVTVSS |
| H1 + H2_F8 | 505 | EVQLVESGGGLVQPGGSLRLSCAASGFTFSNYGVSWVRQAPGK |
| | | GLEWVSIIRADGSTDYASSLKGRFTISRDNSKNTLYLQMNSLR |
| | | AEDTAVYYCAREWHHGPVAYWGQGTLVTVSS |
| rHC1_D1 | 506 | EVQLVESGGGLVQPGGSLRLSCAASGFTFSNYGVQWVRQAPGK |
| | | GLEWVSMIRGDGSTDYASSLKGRFTISRDNSKNTLYLQMNSLR |
| | | AEDTAVYYCARPSHHGLIDNWGQGTLVTVSS |
| rHC2_C2 | 507 | EVQLVESGGGLVQPGGSLRLSCAASGFTFSELGVNWVRQAPGK |
| | | GLEWVSYISDVGSTYYASTVKGRFTISRDNSKNTLYLQMNSLR |
| | | AEDTAVYYCARDWHHGRFDYWGQGTLVTVSS |
| rHC1_G4 | 508 | EVQLVESGGGLVQPGGSLRLSCAASGFTFSNYGVSWVRQAPGK |
| | | GLEWVSLIRADGSTDYADSLKGRFTISRDNSKNTLYLQMNSLR |
| | | AEDTAVYYCAREWHHGPVAYWGQGTLVTVSS |
| rHC1_F3 | 509 | EVQLVESGGGLVQPGGSLRLSCAASGFTFSNYGVTWVRQAPGK |
| | | GLEWVSMIRADGFTDYADSVKGRFTISRDNSKNTLYLQMNSLR |
| | | AEDTAVYYCARDWQHGPSVYWGQGTLVTVSS |
| rHC1_B4 | 510 | EVQLVESGGGLVQPGGSLRLSCAASGFTFSNYGVTWVRQAPGK |
| | | GLEWVSIIRADGVTDYASSVKGRFTISRDNSKNTLYLQMNSLR |
| | | AEDTAVYYCAREWHHGPVAYWGQGTLVTVSS |
| H1 + H2_G3 | 511 | EVQLVESGGGLVQPGGSLRLSCAASGFTFSNYGVHWVRQAPGK |
| | | GLEWVSMIGADGYTDYADSLKGRFTISRDNSKNTLYLQMNSLR |
| | | AEDTAVYYCAREWHHGPVAYWGQGTLVTVSS |
| rHC1_D7 | 512 | EVQLVESGGGLVQPGGSLRLSCAASGFTFSNYGVSWVRQAPGK |
| | | GLEWVSMISADGSTDYASSVKGRFTISRDNSKNTLYLQMNSLR |
| | | AEDTAVYYCAREWHHGPVAYWGQGTLVTVSS |
| rHC1_D5 | 513 | EVQLVESGGGLVQPGGSLRLSCAASGFTFSNYGVTWVRQAPGK |
| | | GLEWVSMIRSDGFTDYADSVKGRFTISRDNSKNTLYLQMNSLR |
| | | TEDTAVYYCAREWHHGPVAYWGQGTLVTVSS |
| H1 + H2_E4 | 514 | EVQLVESGGGLVQPGGSLRLSCAASGFTFSEYGVNWVRQAPGK |
| | | GLEWVSIIWHDGSTAYADTVKSRFTISRDNSKNTLYLQMNSLR |
| | | AEDTAVYYCAREWHHGPVAYWGQGTLVTVSS |
| rHC1_E10 | 515 | EVQLVESGGGLVQPGGSLRLSCAASGFTFSNYGVTWVRQAPGK |
| | | GLEWVSLIRGDGSTDYASSVKSRFTISRDNSKNTLYLQMNSLR |
| | | AEDTAVYYCAREWHHGPVAYWGQGTLVTVSS |
| H1 + H2_B6 | 516 | EVQLVESGGGLVQPGGSLRLSCAASGFTFSNFGVSWVRQAPGK |
| | | GLEWVSMIWGDGSTDYADSLKGRFTISRDNSKNTLYLQMNSLR |
| | | AEDTAVYYCAREWHHGPVAYWGQGTLVTVSS |
| rHC1_B7 | 517 | EVQLVESGGGLVQPGGSLRLSCAASGFTFSNYGVTWVRQAPGK |
| | | GLEWVSMIRDDGSTYYASTVKGRFTISRDNSKNTLYLQMNSLR |
| | | AEDTAVYYCAREWQHGPLGYWGQGTLVTVSS |
| H1 + H2_G8 | 518 | EVQLVESGGGLVQPGGSLRLSCAASGFTFSDFGVNWVRQAPGK |
| | | GLEWVSMIWAGGSTAYASTVKGRFTISRDNSKNTLYLQMNSLR |
| | | AEDTAVYYCAREWHHGPVAYWGQGTLVTVSS |
| rHC1_G5 | 519 | EVQLVESGGGLVQPGGSLRLSCAASGFTFSNYGVSWVRQAPGK |
| | | GLEWVSLIGADGSTDYASTVKGRFTISRDNSKNTLYLQMNSLR |
| | | AEDTAVYYCAREWQYGPLAYWGQGTLVTVSS |
| H1 + H2_F1 | 520 | EVQLVESGGGLVQPGGSLRLSCAASGFTFSNYGVTWVRQAPGK |
| | | GLEWVSMIEGDGGTHYASSVKGRFTISRDNSKNTLYLQMNSLR |
| | | AEDTAVYYCAREWHHGPVAYWGQGTLVTVSS |
| rHC19 | 521 | EVQLVESGGGLVQPGGSLRLSCAASGFTFSNYGVTWVRQAPGK |
| | | GLEWVSMIWADGSTHYASSVKGRFTISRDNSKNTLYLQMNSLR |
| | | AEDTAVYYCAREWQHGPAAYWGQGTLVTVSS |
| H1 + H2_A10 | 522 | EVQLVESGGGLVQPGGSLRLSCAASGFTFSNYGVNWVRQAXGK |
| | | GLEWVSMISADGTTDYASSVKGRFTISRDNSKNTLYLQMNSLR |
| | | AEDTAVYYCAREWHHGPVAYWGQGTLVTVSS |
| rHC1_B9 | 523 | EVQLVESGGGLVQPGGSLRLSCAASGFTFSNYGVTWVRQAPGK |
| | | GLEWVSIIRGDGTTDYASTVKGRFTISRDNSKNTLYLQMNSLR |
| | | AEDTAVYYCAREWQHGPLGYWGQGTLVTVSS |
| H1 + H2_F7 | 524 | EVQLVESGGGLVQPGGSLRLSCAASGFTFSHYGVGWVRQAPGK |
| | | GLEWVSMIWGAGSTNYADTVKSRFTISRDNSKNTLYLQMNSLR |
| | | AEDTAVYYCAREWHHGPVAYWGQGTLVTVSS |
| H1 + H2_B1 | 525 | EVQLVESGGGLVQPGGSLRLSCAASGFTFSSFGVNWVRQAPGK |
| | | GLEWVSMIWADGTTDYADSLKGRFTISRDNSKNTLYLQMNSLR |
| | | AEDTAVYYCAREWHHGPVAYWGQGTLVTVSS |
| rHC1_H9 | 526 | EVQLVESGGGLVQPGGSLRLSCAASGFTFSNYGVTWVRQAPGK |
| | | GLEWVSVIGGDGYTDYADSVKGRFTISRDNSKNTLYLQMNSLR |
| | | AEDTAVYYCAREWQHGPVAYWGQGTLVTVSS |
| H1 + H2_A12 | 527 | EVQLVESGGGLVQPGGSLRLSCAASGFTFSNYGVTWVRQAPGX |
| | | GLEWVSMISSDGYTDYASSVKGRFTISRDNSKNTLYLQMNSLR |
| | | AEDTAVYYCAREWHHGPVAYWGQGTLVTVSS |
| rHC2_G8 | 528 | EVQLVESGGGLVQPGGSLRLSCAASGFTFSNYGVSWVRQAPGK |
| | | GLEWVSMIWSDGSTHYADTVKSRFTISRDNSKNTLYLQMNSLR |
| | | AEDTAVYYCAREWHHGPVAYWGQGTLVTVSS |
| rHC2_B4 | 529 | EVQLVESGGGLVQPGGSLRLSCAASGFTFSQLGVTWVRQAPGK |
| | | GLEWVSTISDAGSTYYASSVKGRFTIIRINSKNTLYLQMNSLR |
| | | AEDTAVYYCARDWHHGRFAYWGQGTLVTVSS |
| H1 + H2_G5 | 530 | EVQLVESGGGLVQPGGSLRLSCAASGFTFSNYGVSWVRQAPGK |
| | | GLEWVSIIRGDGSTYYASSLKGRFTISRDNSKNTLYLQMNSLR |
| | | AEDTAVYYCAREWHHGPVAYWGQGTLVTVSS |
| rHC1_C6 | 531 | EVQLVESGGGLVQPGGSLRLSCAASGFTFSNYGVQWVRQAPGK |
| | | GLEWVSMIRDDGSTSYASTVKGRFTISRDNSKNTLYLQMNSLR |
| | | AEDTAVYYCAREWHHGPVAYWGQGTLVTVSS |
| rHC1_F5 | 532 | EVQLVESGGGLVQPGGSLRLSCAASGFTFSNYGVTWVRQAPGK |
| | | GLEWVSIIRGDGSTDYASSVKSRFTISRDNSKNTLYLQMNSLR |
| | | AEDTAVYYCAREWQHGPVAYWGQGTLVTVSS |
| H1 + H2_B4 | 533 | EVQLVESGGGLVQPGGSLRLSCAASGFTFSAYGVNWVRQAPGK |
| | | GLEWVSMISGDGSTDYADSVKSRFTISRDNSKNTLYLQMNSLR |
| | | AEDTAVYYCAREWHHGPVAYWGQGTLVTVSS |
| H1 + H2_F6 | 534 | EVQLVESGGGLVQPGGSLRLSCAASGFTFSHFGVTWVRQAPGK |
| | | GLEWVSNIWASGSTDYADSVKGRFTISRDNSKNTLYLQMNSLR |
| | | AEDTAVYYCAREWHHGPVAYWGQGTLVTVSS |
| rHC1_B6 | 535 | EVQLVESGGGLVQPGGSLRLSCAASGFTFSNYGVTWVRQAPGK |
| | | GLEWVSMIRADGSTDYADSVKGRFTISRDNSKNTLYLQMNSLR |
| | | AEDTAVYYCAREWQHGPVGYWGQGTLVTVSS |
| H1 + H2_A3 | 536 | EVQLVESGGGLVQPGGSLRLSCAASGFTFSNFGVNWVRQAPGK |
| | | GLEWVSVIWGDGSTAYASSVKSRFTISRDNSKNTLYLQMNSLR |
| | | AEDTAVYYCAREWHHGPVAYWGQGTLVTVSS |
| rHC1_D10 | 537 | EVQLVESGGGLVQPGGSLRLSCAASGFTFSNYGVSWVRQAPGK |
| | | GLEWVSIIRGDGSTDYASSVKGRFTISRDNSKNTLYLQMNSLR |
| | | AEDTAVYYCAREWQHGPLAYWGQGTLVTVSS |
| rHC18 | 538 | EVQLVESGGGLVQPGGSLRLSCAASGFTFSNYGVTWVRQAPGK |
| | | GLEWVSMIWSDGSTDYASSVKGRFTISRDNSKNTLYLQMNSLR |
| | | AEDTAVYYCAREWQHGPVAYWGQGTLVTVSS |
| S4-18 | 539 | EVQLVESGGGLVQPGGSLRLSCAASGFTFSNYGVTWVRQAPGK |
| | | GLEWVSMIWADGSTHYADSVKSRFTISRDNSKNTLYLQMNSLR |
| | | AEDTAVYYCAREWQHGPLAYWGQGTLVTVSS |
| rHC2_E6 | 540 | EVQLVESGGGLVQPGGSLRLSCAASGFTFSNYGVSWVRQAPGK |
| | | GLEWVSLIRGDGSTDYASSLKGRFTISRDNSKNTLYLQMNSLR |
| | | AEDTAVYYCAREWHHGPVAYWGQGTLVTVSS |
| H1 + H2_D4 | 541 | EVQLVESGGGLVQPGGSLRISCAASGFTFSAFGVSWVRQAPGK |
| | | GLEWVSMIWGDGSTDYASSVKGRFTISRDNSKNTLYLQMNSLR |
| | | AEDTAVYYCAREWHHGPVAYWGQGTLVTVSS |
| rHC2_F8 | 542 | EVQLVESGGGLVQPGGSLRLSCAASGFTFSDLGVNWVRQAPGK |
| | | GLEWVSTISDIGSTYYASTVKGRFTISRDNSKNTLYLQMNSLR |
| | | AEDTAVYYCARDWHNGRFDYWGQGTLVTVSS |
| rHC1_F10 | 543 | EVQLVESGGGLVQPGGSLRLSCAASGFTFSNYGVSWVRQAPGK |
| | | GLEWVSIIRGDGFTDYADSVKGRFTISRDNSKNTLYLQMNSLR |
| | | AEDTAVYYCAREWHHGPVAYWGQGTLVTVSS |
| H1 + H2_C12 | 544 | EVQLVESGGGLVQPGGSLRLSCAASGFTFSNYGVTWVRQAPGK |
| | | GLEWVSIIRADGSTDYASSVKGRFTISRDNSKNTLYLQMNSLR |
| | | AEDTAVYYCAREWHHGPVAYWGQGTLVTVSS |
| H1 + H2_C11 | 545 | EVQLVESGGGLVQPGGSLRLSCAASGFTFSHFGVNWVRQAPGK |
| | | GLEWVSIIWGDGSTAYASSVKGRFTISRDNSKNTLYLQMNSLR |
| | | AEDTAVYYCAREWHHGPVAYWGQGTLVTVSS |
| rHC1_C4 | 546 | EVQLVESGGGLVQPGGSLRLSCAASGFTFSNYGVEWVRQAPGK |
| | | GLEWVSKIWADGSTDYADSLKSRFTISRDNSKNTLYLQMNSLR |
| | | AEDTAVYYCAREWQHGPLAYWGQGTLVTVSS |
| H1 + H2_E12 | 547 | EVQLVESGGGLVQPGGSLRLSCAASGFTFSDYGVNWVRQAPGK |
| | | GLEWVSLIWGDGTTDYASSVKGRFTISRDNSKNTLYLQMNSLR |
| | | AEDTAVYYCAREWHHGPVAYWGQGTLVTVSS |
| H1 + H2_C4 | 548 | EVQLVESGGGLVQPGGSLRLSCAASGFTFSYFGVSWVRQAPGK |
| | | GLEWVSMIWGDGSTDYADSVKGRFTISRDNSKNTLYLQMNSLR |
| | | AEDTAVYYCAREWHHGPVAYWGQGTLVTVSS |
| rHC1_F9 | 549 | EVQLVESGGGLVQPGGSLRLSCAASGFTFSNYGVTWVRQAPGK |
| | | GLEWVSMIRSDGSTDYADTLKGRFTISRDNSKNTLYLQMNSLR |
| | | AEDTAVYYCAREWQHGPLAYWGQGTLVTVSS |
| H1 + H2_B5 | 550 | EVQLVESGGGLVQPGGSLRLSCAASGFTFSDFGVNWVRQAPGK |
| | | GLEWVSIIWSDGSTDYASSLKGRFTISRDNSKNTLYLQMNSLR |
| | | AEDTAVYYCAREWHHGPVAYWGQGTLVTVSS |
| S4-34 | 551 | EVQLVESGGGLVQPGGSLRLSCAASGFTFSNYGVSWVRQAPGK |
| | | GLEWVSMIWADGSTHYADTVKGRFTISRDNSKNTLYLQMNSLR |
| | | AEDTAVYYCAREWQHGPLAYWGQGTLVTVSS |
| H1 + H2_C2 | 552 | EVQLVESGGGLVQPGGSLRLSCAASGFTFSEFGVNWVRQAPGK |
| | | GLEWVSMIWGNGATDYASSVKSRFTISRDNSKNTLYLQMNSLR |
| | | AEDTAVYYCAREWHHGPVAYWGQGTLVTVSS |
| H1 + H2_F11 | 553 | EVQLVESGGGLVQPGGSLRLSCAASGFTFSDFGVNWVRQAPGK |
| | | GLEWVSMIWGDGTTAYASSVKSRFTISRDNSKNTLYLQMNSLR |
| | | AEDTAVYYCAREWHHGPVAYWGQGTLVTVSS |
| rHC2_E9 | 554 | EVQLVESGGGLVQPGGSLRLSCAASGFTFSNYGVTWVRQAPGK |
| | | GLEWVSMIRADGSTDYASSVKGRFTISRDNSKNTLYLQMNSLR |
| | | AEDTAVYYCAREWHHGPVAYWGQGTLVTVSS |
| H1 + H2_B2 | 555 | EVQLVESGGGLVQPGGSLRLSCAASGFTFSDFGVNWVRQAPGK |
| | | GLEWVSMIWGDGSTDYADSLKGRFTISRDNSKNTLYLQMNSLR |
| | | AEDTAVYYCAREWHHGPVAYWGQGTLVTVSS |
| H1 + H2_E9 | 556 | EVQLVESGGGLVQPGGSLRLSCAASGFTFSNFGVNWVRQAXGK |
| | | GLEWVSMIWGDGSTDYADSLKGRFTISRDNSKNTLYLQMNSLR |
| | | AEDTAVYYCAREWHHGPVAYWGQGTLVTVSS |
| rHC1_A6 | 557 | EVQLVESGGGLVQPGGSLRLSCAASGFTFSNYGVSWVRQAPGK |
| | | GLEWVSMIGSDGFTDYASSLKGRFTISRDNSKNTLYLQMNSLR |
| | | AEDTAVYYCAREWQHGPVAYWGQGTLVTVSS |
| H1 + H2_C8 | 558 | EVQLVESGGGLVQPGGSLRLSCAASGFTFSNYGVTWVRQTPGK |
| | | GLEWVSMIRGDGSTDYASSVKGRFTISRDNSKNTLYLQMNSLR |
| | | AEDTAVYYCAREWHHGPVAYWGQGTLVTVSS |
| H1 + H2_C5 | 559 | EVQLVESGGGLVQPGGSLRLSCAASGFTFSDFGVSWVRQAPGK |
| | | GLEWVSQIWGDGSTDYADSLKGRFTISRDNSKNTLYLQMNSLR |
| | | AEDTAVYYCAREWHHGPVAYWGQGTLVTVSS |
| rHC2_D5 | 560 | EVQLVESGGGLVQPGGSLRLSCAASGFTFSQLGVTWVRQAPGK |
| | | GLEWVSTISDAGSTYYASSVKGRFTISRDNSKNTLYLQMNSLR |
| | | AEDTAVYYCARDWHHGRFAYWGQGTLVTVSS |
| rHC1_C7 | 561 | EVQLVESGGGLVQPGGSLRLSCAASGFTFSNYGVTWVRQAPGK |
| | | GLEWVSMIRADGSTDYASSVKGRFTISRDNSKNTLYLQMNSLR |
| | | AEDTAVYYCARDWQHGPLGYWGQGTLVTVSS |
| H1 + H2_C3 | 562 | EVQLVESGGGLVQPGGSLRLSCAASGFTFSAYGVHWVRQAPGK |
| | | GLEWVSMIWGDGSTDYADSVKSRFTISRDNSKNTLYLQMNSLR |
| | | AEDTAVYYCAREWHHGPVAYWGQGTLVTVSS |
| rHC1_G7 | 563 | EVQLVESGGGLVQPGGSLRLSCAASGFTFSNYGVTWVRQAPGK |
| | | GLEWVSMIRGDGTTDYASSVKGRFTISRDNSKNTLYLQMNSLR |
| | | AEDTAVYYCARDWQHGPIGYWGQGTLVTVSS |
| rHC1_A5 | 564 | EVQLVESGGGLVQPGGSLRLSCAASGFTFSNYGVTWVRQAPGK |
| | | GLEWVSMIWADGYTDYADSVKGRFTISRDNSKNTLYLQMNSLR |
| | | AEDTAVYYCAREWQHGPLAYWGQGTLVTVSS |
| H1 + H2_G9 | 565 | EVQLVESGGGLVQPGGSLRLSCAASGFTFSNYGVEWVRQAPGK |
| | | GLEWVSKIWGDGTTDYADTLKGRFTISRDNSKNTLYLQMNSLR |
| | | AEDTAVYYCAREWHHGPVAYWGQGTLVTVSS |
| H1 + H2_E2 | 566 | EVQLVESGGGLVQPGGSLRLSCAASGFTFSNYGVTWVRQAPGK |
| | | GLEWVSMIGGEGRTDYADSVKGRFTISRDNSKNTLYLQMNSLR |
| | | AEDTAVYYCAREWHHGPVAYWGQGTLVTVSS |
| rHC1_C9 | 567 | EVQLVESGGGLVQPGGSLRLSCAASGFTFSNLGVNWVRQAPGK |
| | | GLEWVSMIWDVGSTDYASSVKGRFTISRDNSKNTLYLQMNSLR |
| | | AEDTAVYYCARDWHHGLFDYWGQGTLVTVSS |
| rHC1_G6 | 568 | EVQLVESGGGLVQPGGSLRLSCAASGFTFSNYGVTWVRQAPGK |
| | | GLEWVSMIMGDGYTDYADSVKGRFTISRDNSKNTLYLQMNSLR |
| | | AEDTAVYYCAREWQHGPVAYWGQGTLVTVSS |
| rHC1_C1 | 569 | EVQLVESGGGLVQPGGSLRLSCAASGFTFSNYGVTWVRQAPGK |
| | | GLEWVSMIRDDGATDYADSVKGRFTISRDNSKNTLYLQMNSLR |
| | | AEDTAVYYCAREWQHGPLAYWGQGTLVTVSS |
| rHC1_C2 | 570 | EVQLVESGGGLVQPGGSLRLSCAASGFTFSNYGVTWVRQAPGK |
| | | GLEWVSMISGDGYTDYADSVKGRFTISRDNSKNTLYLQMNSLR |
| | | AEDTAVYYCAREWQHGPLAYWGQGTLVTVSS |
| H1 + H2_C1 | 571 | EVQLVESGGGLVQPGGSLRLSCAASGFTFSNYGVTWVRQAPGK |
| | | GLEWVSIIRGDGSTDYADSVKGRFTISRDNSKNTLYLQMNSLR |
| | | AEDTAVYYCAREWHHGPVAYWGQGTLVTVSS |
| H1 + H2_B10 | 572 | EVQLVESGGGLVQPGGSLRLSCAASGFTFSNFGVNWVRQAPGX |
| | | GLEWVSMIWADGSTDYASTLKGRFTISRDNSKNTLYLQMNSLR |
| | | AEDTAVYYCAREWHHGPVAYWGQGTLVTVSS |
| H1 + H2_E3 | 573 | EVQLVESGGGLVQPGGSLRLSCAASGFTFSAFGVCWVRQAPGK |
| | | GLEWVSMIWADGSTDYASSVKGRFTISRDNSKNTLYLQMNSLR |
| | | AEDTAVYYCAREWHHGPVAYWGQGTLVTVSS |
| rHC1_H4 | 574 | EVQLVESGGGLVQPGGSLRLSCAASGFTFSNYGVTWVRQAPGK |
| | | GLEWVSMIRSDGSTDYASSVKSRFTISRDNSKNTLYLQMNSLR |
| | | AEDTAVYYCARDWQHGPEGYWGQGTLVTVSS |
| rHC2_A1 | 575 | EVQLVESGGGLVQPGGSLRLSCAASGFTFSNYGVNWVRQAPGK |
| | | GLEWVSMIRGDGSTDYASSVKGRFTISRDNSKNTLYLQMNSLR |
| | | AEDTAVYYCAREWHHGPVAYWGQGTLVTVSS |
| H1 + H2_G11 | 576 | EVQLVESGGGLVQPGGSLRLSCAASGFTFSNYGVSWVRQAPGK |
| | | GLEWVSLIRSDGSTHYADSLKGRFTISRDNSKNTLYLQMNSLR |
| | | AEDTAVYYCAREWHHGPVAYWGQGTLVTVSS |
| H1 + H2_D8 | 577 | EVQLVESGGGLVQPGGSLRLSCAASGFTFSNYGVNWVRQAPGK |
| | | GLEWVSMIRGDGYTDYASSVKGRFTISRDNSKNTLYLQMNSLR |
| | | AEDTAVYYCAREWHHGPVAYWGQGTLVTVSS |
| rHC1_A3 | 578 | EVQLVESGGGLVQPGGSLRLSCAASGFTFSNYGVTWVRQAPGK |
| | | GLEWVSMIWADGSTHYADSLKGRFTISRDNSKNTLYLQMNSLR |
| | | AEDTAVYYCAREWQHGPVAYWGQGTLVTVSS |
| S4-31 | 579 | EVQLVESGGGLVQPGGSLRLSCAASGFTFSNYGVQWVRQAPGK |
| | | GLEWVSGIGADGSTAYASSLKGRFTISRDNSKNTLYLQMNSLR |
| | | AEDTAVYYCAREWQHSGLAYWGQGTLVTVSS |
| rHC36 | 580 | EVQLVESGGGLVQPGGSLILSCAASGFTFSNYGVSWVRQAPGK |
| | | GLEWVSMIWADGSTHYASSLKGRFTISRDNFKNTLYLQMNSLR |
| | | AEDTAVYYCAREWQHGPVAYWGQGTLVTVSS |
| rHC2_G3 | 581 | EVQLVESGGGLVQPGGSLRLSCAASGFTFSNYGVNWVRQAPGK |
| | | GLEWVSMIRGDGFTDYASSVKGRFTISRDNSKNTLYLQMNSLR |
| | | AEDTAVYYCAREWHHGPVAYWGQGTLVTVSS |
| rHC1_C10 | 582 | EVQLVESGGGLVQPGGSLRLSCAASGFTFSNYGVSWVRQAPGK |
| | | GLEWVSMIAADGSTAYADSLKGRFTISRDNSKNTLYLQMNSLR |
| | | AEDTAVYYCAREWHHGPVAYWGQGTLVTVSS |
| rHC14 | 583 | EVQLVESGGGLVQPGGSLRLSCAASGFTFSNYGVTWVRQAPGK |
| | | GLEWVSMIWADGSTHYASSLKGRFTISRDNSKNTLYLQMNSLR |
| | | AEDTAVYYCAREWQHGPAAYWGQGTLVTVSS |
| rHC1_D4 | 584 | EVQLVESGGGLVQPGGSLRLSCAASGFTFSNYGVTWVRQAPGK |
| | | GLEWVSMIRGDGSTDYADTVKGRFTISRDNSKNTLYLQMNSLR |
| | | AEDTAVYYCAREWHHGPVAYWGQGTLVTVSS |
| rHC2_D11 | 585 | EVQLVESGGGLVQPGGSLRLSCAASGFTFSNYGVSWVRQAPGK |
| | | GLEWVSIISGDGFTDYASSVKGRFTISRDNSKNTLYLQMNSLR |
| | | AEDTAVYYCAREWHHGPVAYWGQGTLVTVSS |
| rHC2_E11 | 586 | EVQLVESGGGLVQPGGSLRLSCAASGFTFSDWGVHWMRQAPGK |
| | | GLEWVSTIWDDGSTYYASSVKSRFTISRDNSKNTLYLQMNSLR |
| | | AEDTAVYYCARHGHHGPFVYWGQGTLVTVSS |
| H1 + H2_E7 | 587 | EVQLVESGGGLVQPGGSLRLSCAASXFTFSNFGVNWVRQAPGK |
| | | GLEWVSMIWGDGSTDYADSVKSRFTISRDNSKNTLYLQMNSLR |
| | | AEDTAVYYCAREWHHGPVAYWGQGTLVTVSS |
| rHC1_A8 | 588 | EVQLVESGGGLVQPGGSLRLSCAASGFTFSVYGVNWVRQAPGK |
| | | GLEWVSMIGDEGSTDYASTVKGRFTISRDNSKNTLYLQMNSLR |
| | | AEDTAVYYCARHWHHGAVDYWGQGTLVTVSS |
| H1 + H2_B9 | 589 | EVQLVESGGGLVQPGGSLRLSCAASGFTFSDYGVNWVRQAPGK |
| | | GLEWVSMIWADGSTHYADSLKSRFTISRDNSKNTLYLQMNSLR |
| | | AEDTAVYYCAREWHHGPVAYWGQGTLVTVSS |
| S4-19 | 590 | EVQLVESGGGLVQPGGSLRLSCAASGFTFSNYGVEWVRQAPGK |
| | | GLEWVSGIWADGSTHYADTVKSRFTISRDNSKNTLYLQMNSLR |
| | | AEDTAVYYCAREWQHGPVAYWGQGTLVTVSS |
| S4-74 | 591 | EVQLVESGGGLVQPGGSLRLSCAASGFTFSNYGVTWVRQAPGK |
| | | GLEWVSMIWADGSTHYADTVKGRFTISRDNSKNTLYLQMNSLR |
| | | AEDTAVYYCAREWQHGPLAYWGQGTLVTVSS |
| rHC1_H2 | 592 | EVQLVESGGGLVQPGGSLRLSCAASGFTFSNYGVTWVRQAPGK |
| | | GLEWVSMIRGDGFTDYASSVKGRFTISRDNSKNTLYLQMNSLR |
| | | AEDTAVYYCAREWQHGPVAYWGQGTLVTVSS |
| rHC1_E3 | 593 | EVQLVESGGGLVQPGGSLRLSCAASGFTFSNYGVTWVRQAPGK |
| | | GLEWVSMIRADGYTSYASSVKGRFTISRDNSKNTLYLQMNSLR |
| | | AEDTAVYYCAREWHHGPVAYWGQGTLVTVSS |
| rHC34 | 594 | EVQLVESGGGLVQPGGSLRLSCAASGFTFSNYGVTWVRQAPGK |
| | | GLEWVSMIWADGSTHYASSVKGRFTISRDNSKNTLYLQMNSLR |
| | | AEDTAVYYCAREWQHGPSAYWGQGTLVTVSS |
| H1 + H2_F2 | 595 | EVQLVESGGGLVQPGGSLRLSCAASGFTFSNYGVNWVRQAPGK |
| | | GLEWVSMIRADGSTDYASSVKSRFTISRDNSKNTLYLQMNSLR |
| | | AEDTAVYYCAREWHHGPVAYWGQGTLVTVSS |
| rHC1_D9 | 596 | EVQLVESGGGLVQPGGSLRLSCAASGFTFSNYGVTWVRQAPGK |
| | | GLEWVSMIRADGTTDYASSVKSRFTISRDNSKNTLYLQMNSLR |
| | | AEDTAVYYCAREWQHGPVGYWGQGTLVTVSS |
| H1 + H2_E6 | 597 | EVQLVESGGGLVQPGGSLRLSCAASGFTFSNFGVHWVRQAPGK |
| | | GLEWVSMIWADGSTVYASSVKSRFTISRDNSKNTLYLQMNSLR |
| | | AEDTAVYYCAREWHHGPVAYWGQGTLVTVSS |
| H1 + H2_F3 | 598 | EVQLVESGGGLVQPGGSLRLSCAASGFTFSNYGVTWVRQAPGK |
| | | GLEWVSMIGSDGSTYYADSLKSRFTISRDNSKNTLYLQMNSLR |
| | | AEDTAVYYCAREWHHGPVAYWGQGTLVTVSS |
| rHC1_G11 | 599 | EVQLVESGGGLVQPGGSLRLSCAASGFTFSNYGVTWVRQAPGK |
| | | GLEWVSMIRGDGFTDYASSVKGRFTISRDNSKNTLYLQMNSLR |
| | | AEDTAVYYCAREWQHGPLGYWGQGTLVTVSS |
| H1 + H2_D3 | 600 | EVQLVESGGGLVQPGGSLRLSCAASGFTFSDFGVNWVRQAPGK |
| | | GLEWVSMIWGDGHTAYASSVKSRFTISRDNSKNTLYLQMNSLR |
| | | AEDTAVYYCAREWHHGPVAYWGQGTLVTVSS |
| H1 + H2_B12 | 601 | EVQLVESGGGLVQPGGSLRLSCAASGFTFSDYGVNWVRQAPGK |
| | | GLEWVSMIWAHGATHYASSVKGRFTISRDNSKNTLYLQMNSLR |
| | | AEDTAVYYCAREWHHGPVAYWGQGTLVTVSS |
| H1 + H2_B11 | 602 | EVQLVESGGGLVQPGGSLRLSCAASGFTFSNYGVTWVRQAPGK |
| | | GLEWVSLIRDDGSTDYASTLKGRFTISRDNSKNTLYLQMNSLR |
| | | AEDTAVYYCAREWHHGPVAYWGQGTLVTVSS |
| H1 + H2_A8 | 603 | EVQLVESGGGLVQPGGSLRLSCAASGFTFSNYGVTWVRQAPGK |
| | | GLEWVSMIWGDGSTDYADSVKSRFTISRDNSKNTLYLQMNSLR |
| | | AEDTAVYYCAREWHHGPVAYWGQGTLVTVSS |
| S4-24 | 604 | EVQLVESGGGLVQPGGSLRLSCAASGFTFSNYGVTWVRQAPGK |
| | | GLEWVSMIWADGSTHYASSVKGRFTISRDNSKNTLYLQMNSLR |
| | | AEDTAVYYCAREWQHGPVAYWGQGTLVTVSS |
| rHC1_F11 | 605 | EVQLVESGGGLVQPGGSLRLSCAASGFTFSNYGVSWVRQAPGK |
| | | GLEWVSMISADGYTDYADSLKSRFTISRDNSKNTLYLQMNSLR |
| | | AEDTAVYYCAREWQHGPVAYWGQGTLVTVSS |
| H1 + H2_D10 | 606 | EVQLVESGGGLVQPGGSLRLSCAASGFTFSNYGVSWVRQAPGK |
| | | GLEWVSMIWADGSTHYASSLKGRFTISRDNSKNTLYLQMNSLR |
| | | AEDTAVYYCAREWHHGPVAYWGQGTLVTVSS |
| rHC2_D6 | 607 | EVQLVESGGGLVQPGGSLRLSCAASGFTFSNYGVNWVRQAPGK |
| | | GLEWVSMIGADGYTDYASTVKGRFTISRDNSKNTLYLQMNSLR |
| | | AEDTAVYYCAREWHHGPVAYWGQGTLVTVSS |
| H1 + H2_G4 | 608 | EVQLVESGGGLVQPGGSLRLSCAASGFTFSAFGVSWVRQAPGK |
| | | GLEWVSMIWADGSTDYADSVKSRFTISRDNSKNTLYLQMNSLR |
| | | AEDTAVYYCAREWHHGPVAYWGQGTLVTVSS |
| H1 + H2_D11 | 609 | EVQLVESGGGLVQPGGSLRLSCAASGFTFSNYGVTWVRQAPGK |
| | | GLEWVSLIRGDGSTDYASSLKGRFTISRDNSKNTLYLQMNSLR |
| | | AEDTAVYYCAREWHHGPVAYWGQGTLVTVSS |
| rHC1_E9 | 610 | EVQLVESGGGLVQPGGSLRLSCAASGFTFSNYGVTWVRQAPGK |
| | | GLEWVSMIWADGTTYYADSVKGRFTISRDNSKNTLYLQMNSLR |
| | | AEDTAVYYCAREWQHGPLAYWGQGTLVTVSS |
| rHC1_A12 | 611 | EVQLVESGGGLVQPGGSLRLSCAASGFTFSNYGVQWVRQAPGK |
| | | GLEWVSRISGDGSTDYASSVKGRFTISRDNSKNTLYLQMNSLR |
| | | AEDTAVYYCAREWHHGPVAYWGQGTLVTVSS |
| H1 + H2_A2 | 612 | EVQLVESGGGLVQPGGSLRLSCAASGFSFSNFGVNWVRQAPGK |
| | | GLEWVSMIWADGSTNYADTVKSRFTISRDNSKNTLYLQMNSLR |
| | | AEDTAVYYCAREWHHGPVAYWGQGTLVTVSS |
| H1 + H2_B7 | 613 | EVQLVESGGGLVQPGGSLRLSCAASGFTFSAYGVSWVRQAPGK |
| | | GLEWVSIISADGSTDYASSVKGRFTISRDNSKNTLYLQMNSLR |
| | | AEDTAVYYCAREWHHGPVAYWGQGTLVTVSS |
| rHC1_H8 | 614 | EVQLVESGGGLVQPGGSLRLSCAASGFTFSNYGVTWVRQAPGK |
| | | GLEWVSMIRGDGSTDYADSLKGRFTISRDNSKNTLYLQMNSLR |
| | | AEDTAVYYCAREWQHGPVAYWGQGTLVTVSS |
| rHC1_F12 | 615 | EVQLVESGGGLVQPGGSLRLSCAASGFTFSNYGVNWVRQAPGK |
| | | GLEWVSMIGADGYTDYADSVKGRFTISRDNSKNTLYLQMNSLR |
| | | AEDTAVYYCAREWHHGPVAYWGQGTLVTVSS |
| rHC1_E5 | 616 | EVQLVESGGGLVQPGGSLRLSCAASGFTFSNYGVTWVRQAPGK |
| | | GLEWVSIIRGDGSTDYASTVKGRFTISRDNSKNTLYLQMNSLR |
| | | AEDTAVYYCAREWHHGPVAYWGQGTLVTVSS |
| H1 + H2_A11 | 617 | EVQLVESGGGLVQPGGSLRLSCAASGFTFSDYGVNWVRQAPGK |
| | | GLEWVSMIWGSGATDYADSVKSRFTISRDNSKNTLYLQMNSLR |
| | | AEDTAVYYCAREWHHGPVAYWGQGTLVTVSS |
| rHC1_D6 | 618 | EVQLVESGGGLVQPGGSLRLSCAASGFTFSNYGVTWVRQAPGK |
| | | GLEWVSMISADGFTDYADSVKGRFTISRDNSKNTLYLQMNSLR |
| | | AEDTAVYYCAREWQHGPVAYWGQGTLVTVSS |
| rHC2_G10 | 619 | EVQLVESGGGLVQPGGSLRLSCAASGFTFSNYGVNWVRQAPGK |
| | | GLEWVSMIAADGFTDYASSVKGRFTISRDNSKNTLYLQMNSLR |
| | | AEDTAVYYCAREWHHGPVAYWGQGTLVTVSS |
| rHC1_H3 | 620 | EVQLVESGGGLVQPGGSLRLSCAASGFTFSNYGVTWVRQAPGK |
| | | GLEWVSLIAADGSTDYASSVKGRFTISRDNSKNTLYLQMNSLR |
| | | AEDTAVYYCAREWQHGPVAYWGQGTLVTVSS |
| H1 + H2_F10 | 621 | EVQLVESGGGLVQPGGSLRLSCAASGFTFSNYGVTWVRQAPGK |
| | | GLEWVSIIRGDGSTAYADTVKGRFTISRDNSKNTLYLQMNSLR |
| | | AEDTAVYYCAREWHHGPVAYWGQGTLVTVSS |
| H1 + H2_C7 | 622 | EVQLVESGGGLVQPGGSLRLSCAASGFTFSNYGVNWVRQAPGK |
| | | GLEWVSMIWGDGNTGYASSVKGRFTISRDNSKNTLYLQMNSLR |
| | | AEDTAVYYCAREWHHGPVAYWGQGTLVTVSS |
| rHC1_A9 | 623 | EVQLVESGGGLVQPGGSLRLSCAASGFTFSNYGVTWVRQAPGK |
| | | GLEWVSMIRGDGSTDYADSVKGRFTISRDNSKNTLYLQMNSLR |
| | | AEDTAVYYCAREWQHGPLAYWGQGTLVTVSS |
| H1 + H2_E5 | 624 | EVQLVESGGGLVQPGGSLRLSCAASGFTFSDYGVNWVRQAPGK |
| | | GLEWVSMIWGDGSTEYADTLKGRFTISRDNSKNTLYLQMNSLR |
| | | AEDTAVYYCAREWHHGPVAYWGQGTLVTVSS |
| rHC62 | 625 | EVQLVESGGGLVQPGGSLRLSCAASGFTFSNYGVSWVRQAPGK |
| | | GLEWVSMIWADGSTHYASSLKGRFTISRDNSKNTLYLQMNSLR |
| | | AEDTAVYYCAREWQHGPVGYWGQGTLVTVSS |
| H1 + H2_F4 | 626 | EVQLVESGGGLVQPGGSLRLSCAASGFTFSNYGVYWVRQAPGK |
| | | GLEWVSMIWDDGSTEYADSVKSRFTISRDNSKNTLYLQMNSLR |
| | | AEDTAVYYCAREWHHGPVAYWGQGTLVTVSS |
| rHC2_H8 | 627 | EVQLVESGGGLVQPGGSLRLSCAASGFTFSQLGVTWVRQAPGK |
| | | GLEWVSTISDAGSTYYASSVKGRFTISRDNSKNTLYLQMNSLR |
| | | AEDTAVYYCARDWHHGRFAYWGQGTLVTVSS |
| rHC2_F4 | 628 | EVQLVESGGGLVQPGGSLRLSCAASGFTFSGPGVNWVRQAPGK |
| | | GLEWVSSIWDDGSTYYASSVKSRFTISRDNSKNTLYLQMNSLR |
| | | AEDTAVYYCARHSHDGRFDYWGQGTLVTVSS |
| S4-50 | 629 | EVQLVESGGGLVQPGGSLRLSCAASGFTFSNYGVEWVRQAPGK |
| | | GLEWVSGIWADGSTHYADTVKSRFTISRDNSKNTLYLQMNSLR |
| | | AEDTAVYYCAREWQHGPVGYWGQGTLVTVSS |
| H1 + H2_F12 | 630 | EVQLVESGGGLVQPGGSLRLSCAASGFTFSDYGVNWVRQAPGK |
| | | GLEWVSMIWGEGSTGYASSVKGRFTISRDNSKNTLYLQMNSLR |
| | | AEDTAVYYCAREWHHGPVAYWGQGTLVTVSS |
| rHC1_E6 | 631 | EVQLVESGGGLVQPGGSLRLSCAASGFTFSNYGVSWVRQAPGK |
| | | GLEWVSIIRDDGFTDYASSVKGRFTISRDNSKNTLYLQMNSLR |
| | | AEDTAVYYCAREWHHGPVAYWGQGTLVTVSS |
| rHC1_F2 | 632 | EVQLVESGGGLVQPGGSLRLSCAASGFTFSNYGVTWVRQAPGK |
| | | GLEWVSMIGGDGSTDYASSVKGRFTISRDNSKNTLYLQMNSLR |
| | | AEDTAVYYCAREWQHGPVAYWGQGTLVTVSS |
| H1 + H2_G6 | 633 | EVQLVESGGGLVQPGGSLRLSCAASGFTFSDFGVNWVRQAPGK |
| | | GLEWVSMIWADGTTDYDDSVKGRFTISRDNSKNTLYLQMNSLR |
| | | AEDTAVYYCAREWHHGPVAYWGQGTLVTVSS |
| rHC2_F5 | 634 | EVQLVESGGGLVQPGGSLRLSCAASGFTFSNYGVNWVRQAPGK |
| | | GLEWVSGISADGSTAYDSSLKGRFTISRDNSKNTLYLQMNSLR |
| | | AEDTAVYYCAREWHHGPVAYWGQGTLVTVSS |
| H1 + H2_D6 | 635 | EVQLVESGGGLVQPGGSLRLSCAASGFTFSSYGVSWVRQAPGK |
| | | GLEWVSLIRGDGSTYYASTVKGRFTISRDNSKNTLYLQMNSLR |
| | | AEDTAVYYCAREWHHGPVAYWGQGTLVTVSS |
| H1 + H2_A9 | 636 | EVQLVESGGGLVQPGGSLRLSCAASGFTFSNFGVNWVRQAPGK |
| | | GLEWVSMIWGDGSTDYASSVKSRFTISRDNSKNTLYLQMNSLR |
| | | AEDTAVYYCAREWHHGPVAYWGQGTLVTVSS |
| H1 + H2_A1 | 637 | EVQLVESGGGLVQPGGSLRLSCAASGFTFSHFGVNWVRQAPGK |
| | | GLEWVSMIWADGSTDYASSLKGRFTISRDNSKNTLYLQMNSLR |
| | | AEDTAVYYCAREWHHGPVAYWGQGTLVTVSS |
| rHC60 | 638 | EVQLVESGGGLVQPGGSLRLSCAASGFTFSNYGVSWVRQAPGK |
| | | GLEWVSMIWADGSTHYASSLKGRFTISRDNSKNTLYLQMNSLR |
| | | AEDTAVYYCAREWQHGPAAYWGQGTLVTVSS |
| rHC1_C8 | 639 | EVQLVESGGGLVQPGGSLRLSCAASGFTFSNYGVHWVRQAPGK |
| | | GLEWVSMIAGDGSTDYASSVKSRFTISRDNSKNTLYLQMNSLR |
| | | AEDTAVYYCAREWQHGPVGYWGQGTLVTVSS |
| rHC44 | 640 | EVQLVESGGGLVQPGGSLRLSCAASGFTFSNYGVSWVRQAPGK |
| | | GLEWVSMIWADGSTHYADTLKSRFTISRDNSKNTLYLQMNSLR |
| | | AEDTAVYYCAREWQHGPVAYWGQGTLVTVSS |
| rHC1_G9 | 641 | EVQLVESGGGLVQPGGSLRLSCAASGFTFSNYGVTWVRQAPGK |
| | | GLEWVSIIGADGATDYADSVKSRFTISRDNSKNTLYLQMNSLR |
| | | AEDTAVYYCAREWQHGPLGYWGQGTLVTVSS |
| H1 + H2_A6 | 642 | EVQLVESGGGLVQPGGSLRLSCAASGFTFSNYGVNWVRQAPGK |
| | | GLEWVSGITGDGITAYASTLKSRFTISRDNSKNTLYLQMNSLR |
| | | AEDTAVYYCAREWHHGPVAYWGQGTLVTVSS |
| H1 + H2_G2 | 643 | EVQLVESGGGLVQPGGSLRLSCAASGFTFSNYGVSWVRQAPGK |
| | | GLEWVSMISGDGFTDYASSVKSRFTISRDNSKNTLYLQMNSLR |
| | | AEDTAVYYCAREWHHGPVAYWGQGTLVTVSS |
| H1 + H2_G7 | 644 | EVQLVESGGGLVQPGGSLRLSCAASGFTFSDYGVNWVRQAPGK |
| | | GLEWVSNIWGDGSTDYASSLKGRFTISRDNSKNTLYLQMNSLR |
| | | AEDTAVYYCAREWHHGPVAYWGQGTLVTVSS |
| H1 + H2_E10 | 645 | EVQLVESGGGLVQPGGSLRLSCAASGFTFSNYGVNWVRQAPGK |
| | | GLEWVSMIRADGSTDYADSLKGRFTISRDNSKNTLYLQMNSLR |
| | | AEDTAVYYCAREWHHGPVAYWGQGTLVTVSS |
| rHC1_E2 | 646 | EVQLVESGGGLVQPGGSLRLSCAASGFTFSNYGVTWVRQAPGK |
| | | GLEWVSMIRGDGSTDYADSVKGRFTISRDNSKNTLYLQMNSLR |
| | | AEDTAVYYCAREWHHGPVAYWGQGTLVTVSS |
| H1 + H2_A4 | 647 | EVQLVESGGGLVQPGGSLRLSCAASGFTFSAYGVSWVRQAPGK |
| | | GLEWVSMIWRDGSTDYADSLKGRFTISRDNSKNTLYLQMNSLR |
| | | AEDTAVYYCAREWHHGPVAYWGQGTLVTVSS |
| H1 + H2_H3 | 648 | EVQLVESGGGLVQPGGSLRLSCAASGFTFSNYGVHWVRQAPGK |
| | | GLEWVSMIWGDGSTHYASSVKSRFTISRDNSKNTLYLQMNSLR |
| | | AEDTAVYYCAREWHHGPVAYWGQGTLVTVSS |
| rHC1_G1 | 649 | EVQLVESGGGLVQPGGSLRLSCAASGFTFSNYGVHWVRQAPGK |
| | | GLEWVSGISADGSTDYASSVKSRFTISRDNSKNTLYLQMNSLR |
| | | AEDTAVYYCAREWHHGPVAYWGQGTLVTVSS |
| H1 + H2_E8 | 650 | EVQLVESGGGLVQPGGSLRLSCAASGFTFSHYGVNWVRQAPGK |
| | | GLEWVSMIGGDGFTDYASSVKGRFTISRDNSKNTLYLQMNSLR |
| | | AEDTAVYYCAREWHHGPVAYWGQGTLVTVSS |
| H1 + H2_C9 | 651 | EVQLVESGGGLVQPGGSLRLSCAASGFTFSNYGVNWVRQAPGK |
| | | GLEWVSMIRADGSTDYASSLKSRFTISRDNSKNTLYLQMNSLR |
| | | AEDTAVYYCAREWHHGPVAYWGQGTLVTVSS |
| rHC1_F7 | 652 | EVQLVESGGGLVQPGGSLRLSCAASGFTFSNYGVQWVRQAPGK |
| | | GLEWVSVISADGFTDYASSVKGRFTISRDNSKNTLYLQMNSLR |
| | | AEDTAVYYCAREWHHGPVAYWGQGTLVTVSS |
| rHC1_F6 | 653 | EVQLVESGGGLVQPGGSLRLSCAASGFTFSNYGVTWVRQAPGK |
| | | GLEWVSMIGADGSTDYASSVKSRFTISRDNSKNTLYLQMNSLR |
| | | AEDTAVYYCAREWQHGPVGYWGQGTLVTVSS |
| rHC22 | 654 | EVQLVESGGGLVQPGGSLRLSCAASGFTFSNYGVTWVRQAPGK |
| | | GLEWVSMIWADGSTDYADTVKGRFTISRDNSKNTLYLQMNSLR |
| | | AEDTAVYYCAREWQHGPVAYWGQGTLVTVSS |
| rHC2_G5 | 655 | EVQLVESGGGLVQPGGSLRLSCAASGFTFSNYGVSWVRQAPGK |
| | | GLEWVSLIRGDGYTDYASSVKGRFTISRDNSKNTLYLQMNSLR |
| | | AEDTAVYYCAREWHHGPVAYWGQGTLVTVSS |
| rHC1_C12 | 656 | EVQLVESGGGLVQPGGSLRLSCAASGFTFSHYGVSWVRQAPGK |
| | | GLEWVSVIRADGVTDYASSVKGRFTISRDNSKNTLYLQMNSLR |
| | | AEDTAVYYCAREWQHGPVGYWGQGTLVTVSS |
| rHC3 | 657 | EVQLVESGGGLVQPGGSLRLSCAASGFTFSNYGVSWVRQAPGK |
| | | GLEWVSMIWADGSTHYASSLKGRFTISRDNSKNTLYLQMNSLR |
| | | AEDTAVYYCAREWQHGPVAYWGQGTLVTVSS |
| rHC1_F1 | 658 | EVQLVESGGGLVQPGGSLRLSCAASGFTFSNYGVQWVRQAPGK |
| | | GLEWVSRINGDGSTDYASTLKGRFTISRDNSKNTLYLQMNSLR |
| | | AEDTAVYYCAREWHHGPVAYWGQGTLVTVSS |
| H1 + H2_E11 | 659 | EVQLVESGGGLVQPGGSLRLSCAASGFTFSNYGVNWVRQAPGK |
| | | GLEWVSMIRSDGFTDYASSVKGRFTISRDNSKNTLYLQMNSLR |
| | | AEDTAVYYCAREWHHGPVAYWGQGTLVTVSS |
| H1 + H2_B8 | 660 | EVQLVESGGGLVQPGGSLRLSCAASGFTFSNFGVNWVRQAPGK |
| | | GLEWVSMIWVDGSTDYADSVKSRFTISRDNSKNTLYLQMNSLR |
| | | AEDTAVYYCAREWHHGPVAYWGQGTLVTVSS |
| H1 + H2_G1 | 661 | EVQLVESGGGLVQPGGSLRLSCAASGFTFSDYGVNWVRQAPGK |
| | | GLEWVSMIWGDGSTYYASSVKSRFTISRDNSKNTLYLQMNSLR |
| | | AEDTAVYYCAREWHHGPVAYWGQGTLVTVSS |
| H1 + H2_B3 | 662 | EVQLVESGGGLVQPGGSLRLSCAASGFTFSHYGVSWVRQAPGK |
| | | GLEWVSMIRSDGFTDYASTVKGRFTISRDNSKNTLYLQMNSLR |
| | | AEDTAVYYCAREWHHGPVAYWGQGTLVTVSS |
| rHC1_D2 | 663 | EVQLVESGGGLVQPGGSLRLSCAASGFTFSNYGVTWVRQAPGK |
| | | GLEWVSMITGDGYTDYADTVKGRFTISRDNSKNTLYLQMNSLR |
| | | AEDTAVYYCAREWQHGPLAYWGQGTLVTVSS |
| rHC1_E12 | 664 | EVQLVESGGGLVQPGGSLRLSCAASGFTFSNYGVSWVRQAPGK |
| | | GLEWVSIIRADGLTDYADSVKSRFTISRDNSKNTLYLQMNSLR |
| | | AEDTAVYYCAREWHHGPVAYWGQGTLVTVSS |
| rHC1_B5 | 665 | EVQLVESGGGLVQPGGSLRLSCAASGFTFSNYGVSWVRQAPGK |
| | | GLEWVSLIRSDGSTDYASSVKSRFTISRDNSKNTLYLQMNSLR |
| | | AEDTAVYYCAREWHHGPVAYWGQGTLVTVSS |
| rHC1_D11 | 666 | EVQLVESGGGLVQPGGSLRLSCAASGFTFSNYGVTWVRQAPGK |
| | | GLEWVSMIRADGSTDYADSVKGRFTISRDNSKNTLYLQMNSLR |
| | | AEDTAVYYCAREWQHGPLAYWGQGTLVTVSS |
| H1 + H2_A7 | 667 | EVQLVESGGGLVQPGGSLRLSCAASGFTFSDYGVIWVRQAPGK |
| | | GLEWVSMIGGDGSTYYDSSLKGRFTISRDNSKNTLYLQMNSLR |
| | | AEDTAVYYCAREWHHGPVAYWGQGTLVTVSS |
| rHC1_G3 | 668 | EVQLVESGGGLVQPGGSLRLSCAASGFTFSNYGVNWVRQAPGK |
| | | GLEWVSMIGSDGSTDYASSVKGRFTISRDNSKNTLYLQMNSLR |
| | | AEDTAVYYCAREWHHGPVAYWGQGTLVTVSS |
| H1 + H2_D5 | 669 | EVQLVESGGGLVQPGGSLRLSCAASGFTFSYYGVHWVRQAPGK |
| | | GLEWVSGISGEGSTDYASSVKGRFTISRDNSKNTLYLQMNSLR |
| | | AEDTAVYYCAREWHHGPVAYWGQGTLVTVSS |
| H1 + H2_D1 | 670 | EVQLVESGGGLVQPGGSLRLSCAASGFTFSNYGVTWVRQAPGK |
| | | GLEWVSMIRGDGSTYYASSVKSRFTISRDNSKNTLYLQMNSLR |
| | | AEDTAVYYCAREWHHGPVAYWVKGTLVTVSS |
| rHC1_E7 | 671 | EVQLVESGGGLVQPGGSLRLSCAASGFTFSNYGVSWVRQAPGK |
| | | GLEWVSIIRGDGSTDYASSLKSRFTISRDNSKNTLYLQMNSLR |
| | | AEDTAVYYCAREWHHGPVAYWGQGTLVTVSS |
| rHC1_E11 | 672 | EVQLVESGGGLVQPGGSLRLSCAASGFTFSNYGVTWVRQAPGK |
| | | GLEWVSMIRADGTTDYASSVKGRFTISRDNSKNTLYLQMNSLR |
| | | AEDTAVYYCAREWHHGPVAYWGQGTLVTVSS |
| S4-55 | 673 | EVQLVESGGGLVQPGGSLRLSCAASGFTFSNYGVTWVRQAPGK |
| | | GLEWVSMIWADGSTDYASTVKGRFTISRDNSKNTLYLQMNSLR |
| | | AEDTAVYYCAREWQHGPVGYWGQGTLVTVSS |
| H1 + H2_C10 | 674 | EVQLVESGGGLVQPGGSLRLSCAASGFTFSNYGVSWVRQAPGK |
| | | GLEWVSMIRGDGSTYYADTLKGRFTISRDNSKNTLYLQMNSLR |
| | | AEDTAVYYCAREWHHGPVAYWGQGTLVTVSS |
| H1 + H2_G10 | 675 | EVQLVESGGGLVQPGGSLRLSCAASGFTFSHFGVNWVRQAPGK |
| | | GLEWVSMIWADGSTSYADSVKSRFTISRDNSKNTLYLQMNSLR |
| | | AEDTAVYYCAREWHHGPVAYWGQGTLVTVSS |

[0113] Table 20 provides a list of amino acid sequences of VL regions of affinity matured fully human TNF antibodies derived from hMAK195 Amino acid residues of individual CDRs of each VH sequence are indicated in bold.

TABLE 20
List of amino acid sequences of affinity
matured hMAK195 VL variants

| | SEQ | |
|---|---|---|
| | ID | |
| Clone | NO: | VL |
| S3_92 | 676 | DIQMTQSPSSLSASVGDRVTITCRASQKVSSAVAWYQQK |
| | | PGKAPKLLIYWASTRHTGVPSRFSGSGSGTDFTLTISSL |
| | | QPEDFATYYCQQHYHTPYTFGQGTKLEIK |
| S3_79 | 677 | DIQMTQSPSSLSASVGDRVTITCKASQAVSTEVAWYQQK |
| | | PGKAPKLLIYCASTRQTGVPSRFSGSGSGTDFTLTISSL |
| | | QPEDFATYYCQQSYSAPYTFGQGTKLEIK |
| S3_68 | 678 | DIQMTQSPSSLSASVGDRVTITCRASQVVSSAVAWYQQK |
| | | PGKAPKLLIYWASKRHTGVPSRFSGSGSGTDFTLTISSL |
| | | QPEDFATYYCQQHYSTPFTFGQGTKLEIK |
| S3_60 | 679 | DIQMTQSPSSLSASVGDRVTITCRASQAVSSAVAWYQQK |
| | | PGKAPKLLIYWASTRHTGVPSRFSGSGSGTDFTLTISSL |
| | | QPEDFATYYCQQHYSTPFTFGQGTKLEIK |
| S4-63 | 680 | DIQMTQSPSSLSASVGDRVTITCKASQKVSSALAWYQQK |
| | | PGKAPKLLIYWASALHSGVPSRFSGSGSGTDFTLTISSL |
| | | QPEDFATYYCQQHYRPPFTFGQGTKLEIK |
| S3_5 | 681 | DIQMTQSPSSLSASVGDRVTITCRASQGVSSAVAWYQQK |
| | | PGKAPKLLIYWASTRHTGVPSRFSGSGSGTDFTLTISSL |
| | | QPEDFATYYCQQHYTTPFTFGQGTKLEIK |
| S3_44 | 682 | DIQMTQSPSSLSASVGDRVTITCRASQGVSRALAWYQQK |
| | | PGKAPKLLIYWASTLHSGVPSRFSGSGSGTDFTLTISSL |
| | | QPEDFATYYCQQHYRAPFTFGQGTKLEIK |
| S3_53 | 683 | DIQMTQSPSSLSASVGDRVTITCRASQAVSSAVAWYQQK |
| | | PGKAPKLLIYWASTRHTGVPSRFSGSGSGTDFTLTISSL |
| | | QPEDFATYYCQQHYHTPFTFGQGTKLEIK |
| S3_91 | 684 | DIQMTQSPSSLSASVGDRVTITCKASQGVSSALAWYQQK |
| | | PGKAPKLLIYWASTRHSGVPSRFSGSGSGTDFTLTISSL |
| | | QPEDFATYYCQQHYRTPFTFGQGTKLEIK |
| S3_59 | 685 | DIQMTQSPSSLSASVGDRVTITCKASQGVSSALAWYQQK |
| | | PGKAPKLLIYWASTRHSGVPSRFSGSGSGTDFTLTISSL |
| | | QPEDFATYYCQQHYSTPYTFGQGTKLEIK |
| S3_47 | 686 | DIQMTQSPSSLSASVGDRVTITCKASQWVSSAVAWYQQK |
| | | PGKAPKLLIYWASTRQSGVPSRFSGSGSGTDFTLTISSL |
| | | QPEDFATYYCQQHYRIPFTFGQGTKLEIK |
| S3_70 | 687 | DIQMTQSPSSLSASVGDRVTITCKASQAVSSALAWYQQK |
| | | PGKAPKLLIYWASTRHSGVPSRFSGSGSGTDFTLTISSL |
| | | QPEDFATYYCQQHYSTPYTFGQGTKLEIK |
| S3_56 | 688 | DIQMTQSPSSLSASVGDRVTITCKASQRVSSAVAWYQQK |
| | | PGKAPKLLIYWASTLHTGVPSRFSGSGSGTDFTLTISSL |
| | | QPEDFATYYCQQHYSTPYTFGQGTKLEIK |
| S3_37 | 689 | DIQMTQSPSSLSASVGDRVTITCKASQGVSSAVAWYQQK |
| | | PGKAPKLLIYWASTRHTGVPSRFSGSGSGTDFTLTISSL |
| | | QPEDFATYYCQQHYNTPFTFGQGTKLEIK |
| S3_36 | 690 | DIQMTQSPSSLSASVGDRVTITCKASQKVSSAVAWYQQK |
| | | PGKAPKLLIYWASARHTGVPSRFSGSGSGTDFTLTISSL |
| | | QPEDFATYYCQQHYSTPFTFGQGTKLEIK |
| S3_67 | 691 | DIQMTQSPSSLSASVGDRVTITCKASQTVXRAVAWYQQK |
| | | PGKAPKLLIYWASTRQSGVPSRFSGSGSGTDFTLTISSL |
| | | QPEDFATYYCQQSYSTPFTFGQGTKLEIK |
| S3_40 | 692 | DIQMTQSPSSLSASVGDRVTITCRASQRVSSAVAWSQQK |
| | | PGKAPKLLIYWASTRHSGVPSRFSGSGSGTDFTLTISSL |
| | | QPEDFATYYCQQHYTTPYTFGQGTKLEIK |
| S3_73 | 693 | DIQMTQSPSSLSASVGDRVTITCKASQAVSSAVAWYQQK |
| | | PGKAPKLLIYWASTRHSGVPSRFSGSGSGTDFTLTISSL |
| | | QPEDFATYYCQQHYSTPFTFGQGTKLEIK |
| S4-50 | 694 | DIQMTQSPSSLSASVGDRVTITCKASQLVSSAVAWYQQK |
| | | PGKAPKLLIYWASALHTGVPSRFSGSGSGTDFTLTISSL |
| | | QPEDFATYYCQQHYSSPYTFGQGTKLEIK |
| S4-6 | 695 | DIQMTQSPSSLSASVGDRVTITCKASQLVSSAVAWYQQK |
| | | PGKAPKLLIYWASTRHTGVPSRFSGSGSGTDFTLTISSL |
| | | QPEDFATYYCQQHYSTPFTFGQGTKLEIK |
| S3_19 | 696 | DIQMTQSPSSLSASVGDRVTITCKASQKVSSAVAWYQQK |
| | | PGKAPKLLIYWASARHSGVPSRFSGSGSGTDFTLTISSL |
| | | QPEDFATYYCQQHYRSPFTFGQGTKLEIK |
| S3_83 | 697 | DIQMTQSPSSLSASVGDRVTITCRASQAVSTALAWYQQK |
| | | PGKAPKLLIYSASTLQSGVPSRFSGSGSGTDFTLTISSL |
| | | QPEDFATYYCQQHYRSPFTFGQGTKLEIK |
| S3_78 | 698 | DIQMTQSPSSLSASVGDRVTITCKASQYVGGAVAWYQQK |
| | | PGKAPKLLIYQASTLQTGVPSRFSGSGSGTDFTLTISSL |
| | | QPEDFATYYCQQHISKPFTFGQGTKLEIK |
| S4-19 | 699 | DIQMTQSPSSLSASVGDRVTITCKASQLVSSAVAWYQQK |
| | | PGKAPKLLIYWASTLHTGVPSRFSGSGSGTDFTLTISSL |
| | | QPEDFATYYCQQHYRTPFTFGQGTKLEIK |
| S3_58 | 700 | DIQMTQSPSSLSASVGDRVTITCKASQSVNGALAWYQQK |
| | | PGKAPKLLIYRASTRQTGVPSRFSGSGSGTDFTLTISSL |
| | | QPEDFATYYCQQHYSIPFTFGQGTKLEIK |
| S4-31 | 701 | DIQMTQSPSSLSASVGDRVTITCRASQGVSSALAWYQQK |
| | | PGKAPKLLIYWASALHSGVPSRFSGSGSGTDFTLTISSL |
| | | QPEDFATYYCQQHYSAPFTFGQGTKLEIK |
| S3_31 | 702 | DIQMTQSPSSLSASVGDRVTITCKASQAVSSSVAWYQQK |
| | | PGKAPKLLIYGASTLQSGVPSRFSGSGSGTDFTLTISSL |
| | | QPEDFATYYCQQHYNEPYTFGQGTKLEIK |
| S3_13 | 703 | DIQMTQSPSSLSASVGDRVTITCKASQKVSSAVAWYQQK |
| | | PGKAPKLLIYWASARHSGVPSRFSGSGSGTDFTLTISSL |
| | | QPEDFATYYCQQHYRTPYTFGQGTKLEIK |
| S4-40 | 704 | DIQMTQSPSSLSASVGDRVTITCRASQLVSSAVAWYQQK |
| | | PGKAPKLLIYWASTRHSGVPSRFSGSGSGTDFTLTISSL |
| | | QPEDFATYYCQQHYRTPFSFGQGTKLEIK |
| S3_26 | 705 | DIQMTQSPSSLSASVGDRVTITCRASQAVSSAVAWYQQK |
| | | PGKAPKLLIYWASKRQTGVPSRFSGSGSGTDFTLTISSL |
| | | QPEDFATYYCQQHYISPYTFGQGTKLEIK |
| S3_33 | 706 | DIQMTQSPSSLSASVGDRVTITCKASQGVRSALAWYQQK |
| | | PGKAPKLLIYWASTRHTGVPSRFSGSGSGTDFTLTISSL |
| | | QPEDFATYYCQQSYSAPYTFGQGTKLEIK |
| S3_28 | 707 | DIQMTQSPSSLSASVGDRVTITCKASQTVSNAVAWYQQK |
| | | PGKAPKLLIYWASTRHSGVPSRFSGSGSGTDFTLTISSL |
| | | QPEDFATYYCQQHYSTPFTFGQGTKLEIK |
| S4-74 | 708 | DIQMTQSPSSLSASVGDRVTITCRASQLVSSAVAWYQQK |
| | | PGKAPKLLIYWASARHTGVPSRFSGSGSGTDFTLTISSL |
| | | QPEDFATYYCQQHYRTPFTFGQGTKLEIK |
| S3_84 | 709 | DIQMTQSPSSLSASVGDRVTITCKASQPVRSAVAWYQQK |
| | | PGKAPKLLIYSASTRQTGVPSRFSGSGSGTDFTLTISSL |
| | | QPEDFATYYCQQSYSIPFTFGQGTKLEIK |
| S4-54 | 710 | DIQMTQSPSSLSASVGDRVTITCRASQLVSSAVAWYQQK |
| | | PGKAPKLLIYWASARHTGVPSRFSGSGSGTDFTLTISSL |
| | | QPEDFATYYCQQHYKTPFSFGQGTKLEIK |
| S3_23 | 711 | DIQMTQSPSSLSASVGDRVTITCRASQAVSSAVAWYQQK |
| | | PGKAPKLLIYWASSRHTGVPSRFSGSGSGTDFTLTISSL |
| | | QPEDFATYYCQQHYSTPFTFGQGTKLEIK |
| S3_55 | 712 | DIQMTQSPSSLSASVGDRVTITCKASQTVGRAVAWYQQK |
| | | PGKAPKLLIYWASTRQSGVPSRFSGSGSGTDFTLTISSL |
| | | QPEDFATYYCQQSYSTPFTFGQGTKLEIK |
| S4-34 | 713 | DIQMTQSPSSLSASVGDRVTITCRASQLVSSAVAWYQQK |
| | | PGKAPKLLIYWASTRHTGVPSRFSGSGSGTDFTLTISSL |
| | | QPEDFATYYCQQHYRTPFTFGQGTKLEIK |
| S3_76 | 714 | DIQMTQSPSSLSASVGDRVTITCRASQKVSNAVAWYQQK |
| | | PGKAPKLLIYWASTRHTGVPSRFSGSGSGTDFTLTISSL |
| | | QPEDFATYYCQQHYNSPFTFGQGTKLEIK |
| S4-12 | 715 | DIQMTQSPSSLSASVGDRVTITCRASQLVSSAVAWYQQK |
| | | PGKAPKLLIYWASARHTGVPSRFSGSGSGTDFTLTISSL |
| | | QPEDFATYYCQQHYKTPFTFGQGTKLEIK |
| S3_86 | 716 | DIQMTQSPSSLSASVGDRVTITCRASQRVSSAVAWYQQK |
| | | PGKAPKLLIYWASTRHSGVPSRFSGSGSGTDFTLTISSL |
| | | QPEDFATYYCQQHYTTPYTFGQGTKLEIK |
| S3_61 | 717 | DIQMTQSPSSLSASVGDRVTITCKASQRVSSAVAWYQQK |
| | | PGKAPKLLIYWASNRHSGVPSRFSGSGSGTDFTLTISSL |
| | | QPEDFATYYCQQHYSTPFTFGQGTKLEIK |
| S3_18 | 718 | DIQMTQSPSSLSASVGDRVTITCKASQLVSSALAWYQQK |
| | | PGKAPKLLIYWASTRQSGVPSRFSGSGSGTDFTLTISSL |
| | | QPEDFATYYCQQHYRTPFTFGQGTKLEIK |
| S3_72 | 719 | DIQMTQSPSSLSASVGDRVTITCKASQLVSSALAWYQQK |
| | | PGKAPKLLIYWASTRHTGVPSRFSGSGSGTDFTLTISSL |
| | | QPEDFATYYCQQHYRNPFTFGQGTKLEIK |
| S3_41 | 720 | DIQMTQSPSSLSASVGDRVTITCKASQAVSSALAWYQQK |
| | | PXKAPKLLIYWASSRQSGVPSRFSGSGSGTDFTLTISSL |
| | | QPEDFATYYCQQHYRTPFTFGQGTKLEIK |
| S4-24 | 721 | DIQMTQSPSSLSASVGDRVTITCRASQLVSSAVAWYQQK |
| | | PGKAPKLLIYWASTLHTGVPSRFSGSGSGTDFTLTISSL |
| | | QPEDFATYYCQQHYRTPFTFGQGTKLEIK |
| S4-17 | 722 | DIQMTQSPSSLSASVGDRVTITCRASQLVSSAVAWYQQK |
| | | PGKAPKLLIYWASTRHSGVPSRFSGSGSGTDFTLTISSL |
| | | QPEDFATYYCQQHYRTPFTFGQGTKLEIK |
| S3_90 | 723 | DIQMTQSPSSLSASVGDRVTITCKASQPVSGAVAWYQQK |
| | | PGKAPKLLIYWASTRHTGVPSRFSGSGSGTDFTLTISSL |
| | | QPEDFATYYCQQHYRASYTFGQGTKLEIK |
| S3_87 | 724 | DIQMTQSPSSLSASVGDRVTITCRASQKVSSAVAWYQQK |
| | | PGKAPKLLIYWASARHTGVPSRFSGSGSGTDFTLTISSL |
| | | QPEDFATYYCQQHYRTPYTFGQGTKLEIK |
| S3_66 | 725 | DIQMTQSPSSLSASVGDRVTITCRASQRVSSAVAWYQQK |
| | | PGKAPKLLIYWASTRHSGVPSRFSGSGSGTDFTLTISSL |
| | | QPEDFATYYCQQHYTTPYTFGQGTKLEIK |
| S4-18 | 726 | DIQMTQSPSSLSASVGDRVTITCRASQLVSSAVAWYQQK |
| | | PGKAPKLLIYWASTLHSGVPSRFSGSGSGTDFTLTISSL |
| | | QPEDFATYYCQQHYSTPFTFGQGTKLEIK |
| S3_4 | 727 | DIQMTQSPSSLSASVGDRVTITCRASQAVSSAVAWYQQK |
| | | PGKAPKLLIYWASARHTGVPSRFSGSGSGTDFTLTISSL |
| | | QPEDFATYYCQQHYSSPYTFGQGTKLEIK |
| S3_64 | 728 | DIQMTQSPSSLSASVGDRVTITCKASQPVSSAVAWYQQK |
| | | PGKAPKLLIYWASTLHSGVPSRFSGSGSGTDFTLTISSL |
| | | QPEDFATYYCQQHYRTPFTFGQGTKLEIK |
| S3_62 | 729 | DIQMTQSPSSLSASVGDRVTITCRASQLVSSAVAWYQQK |
| | | PGKAPKLLIYWASTRHTGVPSRFSGSGSGTDFTLTISSL |
| | | QPEDFATYYCQQHYRTPYTFGQGTNLEIK |
| S3_29 | 730 | DIQMTQSPSSLSASVGDIVTITCKASQLVSSAVAWYQQK |
| | | PGKAPKLLIYWASTRHTGVPSRFSGSGSGTDFTLTISSL |
| | | QPEDFATYYCQQHYRTPYTFGQGTKLEIK |
| S3_65 | 731 | DIQMTQSPSSLSASVGDRVTITCKASQLVSSAVAWYQQK |
| | | PGKAPKLLIYWASMRHSGVPSRFSGSGSGTDFTLTISSL |
| | | QPEDFATYYCQQHYSSPFTFGQGTKLEIK |
| S3_81 | 732 | DIQMTQSPSSLSASVGDRVTITCKASQTVSSAVAWYQQK |
| | | PGKAPKLLIYWASTRHSGVPSRFSGSGSGTDFTLTISSL |
| | | QPEDFATYYCQQHYRAPYTFGQGTKLEIK |
| S3_39 | 733 | DIQMTQSPSSLSASVGDRVTITCKASQRVSSALAWYQQK |
| | | PGKAPKLLIYWASTRHTGVPSRFSGSGSGTDFTLTISSL |
| | | QPEDFATYYCQQHYSTPFTFGQGTKLEIK |
| S3_49 | 734 | DIQMTQSPSSLSASVGDRVTITCRASQLVSNAVAWYQQK |
| | | PGKAPKLLIYWASTRHTGVPSRFSGSGSGTDFTLTISSL |
| | | QPEDFATYYCQQHYSSPFTFGQGTKLEIK |
| S3_85 | 735 | DIQMTQSPSSLSASVGDRVTITCRASQLVSSAVAWYQQK |
| | | PGKAPKLLIYWASARHSGVPSRFSGSGSGTDFTLTISSL |
| | | QPEDFATYYCQQHYSTPFTFGQGTKLEIK |
| S3_82 | 736 | DIQMTQSPSSLSASVGDRVTITCKASQLVSSAVAWYQQK |
| | | PGKAPKLLIYWASTRHSGVPSRFSGSGSGTDFTLTISSL |
| | | QPEDFATYYCQQHYTTPFTFGQGTKLEIK |
| S3_93 | 737 | DIQMTQSPSSLSASVGDRVTITCKASQRVSSAVAWYQQK |
| | | PGKAPKLLIYWASTRHTGVPSRFSGSGSGTDFTLTISSL |
| | | QPEDFATYYCQQHYSTPFTFGQGTKLEIK |

TABLE 21
Amino acid residues observed in affinity matured hMAK-195.
hMAK195 Heavy chain variable region (SEQ ID NO: 1075)

| | |
|---|---|
| hMAK195VH | EVQLVESGGGLVQPGGSLRLSCAASGFTFSDYGVNWVRQAPGKGLEWVSMIWGDGSTD |
| | NFS T I RAG T A |
| | HLN S V GSE F H |
| | YS H L SDA A V |
| | IR Q R AEV Y S |
| | Y K LVG W N |
| | S NY G |
| | YDSTLKSRFTISRDNSKNTLYLQMNSLRAEDTAVYYCAREWHHGPVAYWGQGTLVTVSS |
| | ADSV G HSQQRTLDS |
| | QLRPASGVF |
| | LCLLVQDGC |
| | YRYNWAETN |
| | DFPYEKW P |
| | NDARS R I |
| | TYVTP P H |
| | PPDDI A |
| | AICA I |
| | SG C |
| | R |

hMAK195 Light chain variable region (SEQ ID NO: 1076)

| | |
|---|---|
| hMAK195VL | DIQMTQSPSSLSASVGDRVTITCKASQAVSSAVAWYQQKPGKAPKLLIYWASTRHTG |
| | R S RRPL S SLQS |
| | V TNT R I T |
| | G IGG L L A |
| | D NCV C K E |
| | T CTS Q A F |
| | P KIR G R |
| | VPSRFSGSGSGTDFTLTISSLQPEDFATYYCQQHYSTPFTFGQGTKLEIK |
| | SNRSTY |
| | FGPR |
| | DTML |
| | GIIQ |
| | HCAA |
| | S |

[0114] The tables below provide a list of humanized MAK-195 antibodies that were converted into IgG proteins for characterization.

TABLE 22
VH sequences of IgG converted clones

| Protein | | | |
|---|---|---|---|
| region | | SEQ ID NO: | Sequence |
| | | | 123456789012345678901234567890 |
| A8 | | 738 | EVQLVESGGGLVQPGGSLRLSCAASGFTFS |
| VH | | | NYGVNWVRQAPGKGLEWVSMIAADGFTDYA |
| | | | SSVKGRFTISRDNSKNTLYLQMNSLRAEDT |
| | | | AVYYCAREWHHGPVAYWGQGTLVTVSS |
| A8 | CDR-H1 | Residues 31-35 | NYGVN |
| VH | | of SEQ ID | |
| | | NO.: 738 | |
| A8 | CDR-H2 | Residues 50-65 | MIAADGFTDYASSVKG |
| VH | | of SEQ ID | |
| | | NO.: 738 | |
| A8 | CDR-H3 | Residues 98-106 | EWHHGPVAY |
| VH | | of SEQ ID | |
| | | NO.: 738 | |
| B5 | | 739 | EVQLVESGGGLVQPGGSLRLSCAASGFTFS |
| VH | | | NYGVSWVRQAPGKGLEWVSLIRGDGSTDYA |
| | | | SSLKGRFTISRDNSKNTLYLQMNSLRAEDT |
| | | | AVYYCAREWHHGPVAYWGQGTLVTVSS |
| B5 | CDR-H1 | Residues 31-35 | NYGVS |
| VH | | of SEQ ID | |
| | | NO.: 739 | |
| B5 | CDR-H2 | Residues 50-65 | LIRGDGSTDYASSLKG |
| VH | | of SEQ ID | |
| | | NO.: 739 | |
| B5 | CDR-H3 | Residues 98-106 | EWHHGPVAY |
| VH | | of SEQ ID | |
| | | NO.: 739 | |
| rHC44 | | 740 | EVQLVESGGGLVQPGGSLRLSCAASGFTFS |
| VH | | | NYGVSWVRQAPGKGLEWVSMIWADGSTHYA |
| | | | DTLKSRFTISRDNSKNTLYLQMNSLRAEDT |
| | | | AVYYCAREWQHGPVAYWGQGTLVTVSS |
| rHC44 | CDR-H1 | Residues 31-35 | NYGVS |
| VH | | of SEQ ID | |
| | | NO.: 740 | |
| rHC44 | CDR-H2 | Residues 50-65 | MIWADGSTHYADTLKS |
| VH | | of SEQ ID | |
| | | NO.: 740 | |
| rHC44 | CDR-H3 | Residues 98-106 | EWQHGPVAY |
| VH | | of SEQ ID | |
| | | NO.: 740 | |
| rHC22 | | 741 | EVQLVESGGGLVQPGGSLRLSCAASGFTFS |
| VH | | | NYGVTWVRQAPGKGLEWVSMIWADGSTDYA |
| | | | DTVKGRFTISRDNSKNTLYLQMNSLRAEDT |
| | | | AVYYCAREWQHGPVAYWGQGTLVTVSS |
| rHC22 | CDR-H1 | Residues 31-35 | NYGVT |
| VH | | of SEQ ID | |
| | | NO.: 741 | |
| rHC22 | CDR-H2 | Residues 50-65 | MIWADGSTDYADTVKG |
| VH | | of SEQ ID | |
| | | NO.: 741 | |
| rHC22 | CDR-H3 | Residues 98-106 | EWQHGPVAY |
| VH | | of SEQ ID | |
| | | NO.: 741 | |
| rHC81 | | 742 | EVQLVESGGGLVQPGGSLRLSCAASGFTFS |
| VH | | | NYGVTWVRQAPGKGLEWVSMIWADGSTHYA |
| | | | DSVKSRFTISRDNSKNTLYLQMNSLRAEDT |
| | | | AVYYCAREWQHGPLAYWGQGTLVTVSS |
| rHC81 | CDR-H1 | Residues 31-35 | NYGVT |
| VH | | of SEQ ID | |
| | | NO.: 742 | |
| rHC81 | CDR-H2 | Residues 50-65 | MIWADGSTHYADSVKS |
| VH | | of SEQ ID | |
| | | NO.: 742 | |
| rHC81 | CDR-H3 | Residues 98-106 | EWQHGPLAY |
| VH | | of SEQ ID | |
| | | NO.: 742 | |
| rHC18 | | 743 | EVQLVESGGGLVQPGGSLRLSCAASGFTFS |
| VH | | | NYGVTWVRQAPGKGLEWVSMIWSDGSTDYA |
| | | | SSVKGRFTISRDNSKNTLYLQMNSLRAEDT |
| | | | AVYYCAREWQHGPVAYWGQGTLVTVSS |
| rHC18 | CDR-H1 | Residues 31-35 | NYGVT |
| VH | | of SEQ ID | |
| | | NO.: 743 | |
| rHC18 | CDR-H2 | Residues 50-65 | MIWSDGSTDYASSVKG |
| VH | | of SEQ ID | |
| | | NO.: 743 | |
| rHC18 | CDR-H3 | Residues 98-106 | EWQHGPVAY |
| VH | | of SEQ ID | |
| | | NO.: 743 | |
| rHC14 | | 744 | EVQLVESGGGLVQPGGSLRLSCAASGFTFS |
| VH | | | NYGVTWVRQAPGKGLEWVSMIWADGSTHYA |
| | | | SSLKGRFTISRDNSKNTLYLQMNSLRAEDT |
| | | | AVYYCAREWQHGPAAYWGQGTLVTVSS |
| rHC14 | CDR-H1 | Residues 31-35 | NYGVT |
| VH | | of SEQ ID | |
| | | NO.: 744 | |
| rHC14 | CDR-H2 | Residues 50-65 | MIWADGSTHYASSLKG |
| VH | | of SEQ ID | |
| | | NO.: 744 | |
| rHC14 | CDR-H3 | Residues 98-106 | EWQHGPAAY |
| VH | | of SEQ ID | |
| | | NO.: 744 | |
| rHC3 | | 745 | EVQLVESGGGLVQPGGSLRLSCAASGFTFS |
| VH | | | NYGVSWVRQAPGKGLEWVSMIWADGSTHYA |
| | | | SSLKGRFTISRDNSKNTLYLQMNSLRAEDT |
| | | | AVYYCAREWQHGPVAYWGQGTLVTVSS |
| rHC3 | CDR-H1 | Residues 31-35 | NYGVS |
| VH | | of SEQ ID | |
| | | NO.: 745 | |
| rHC3 | CDR-H2 | Residues 50-65 | MIWADGSTHYASSLKG |
| VH | | of SEQ ID | |
| | | NO.: 745 | |
| rHC3 | CDR-H3 | Residues 98-106 | EWQHGPVAY |
| VH | | of SEQ ID | |
| | | NO.: 745 | |
| rHC19 | | 746 | EVQLVESGGGLVQPGGSLRLSCAASGFTFS |
| VH | | | NYGVTWVRQAPGKGLEWVSMIWADGSTHYA |
| | | | SSVKGRFTISRDNSKNTLYLQMNSLRAEDT |
| | | | AVYYCAREWQHGPAAYWGQGTLVTVSS |
| rHC19 | CDR-H1 | Residues 31-35 | NYGVT |
| VH | | of SEQ ID | |
| | | NO.: 746 | |
| rHC19 | CDR-H2 | Residues 50-65 | MIWADGSTHYASSVKG |
| VH | | of SEQ ID | |
| | | NO.: 746 | |
| rHC19 | CDR-H3 | Residues 98-106 | EWQHGPAAY |
| VH | | of SEQ ID | |
| | | NO.: 746 | |
| rHC34 | | 747 | EVQLVESGGGLVQPGGSLRLSCAASGFTFS |
| VH | | | NYGVTWVRQAPGKGLEWVSMIWADGSTHYA |
| | | | SSVKGRFTISRDNSKNTLYLQMNSLRAEDT |
| | | | AVYYCAREWQHGPVAYWGQGTLVTVSS |
| rHC34 | CDR-H1 | Residues 31-35 | NYGVT |
| VH | | of SEQ ID | |
| | | NO.: 747 | |
| rHC34 | CDR-H2 | Residues 50-65 | MIWADGSTHYASSVKG |
| VH | | of SEQ ID | |
| | | NO.: 747 | |
| rHC34 | CDR-H3 | Residues 98-106 | EWQHGPSAY |
| VH | | of SEQ ID | |
| | | NO.: 747 | |
| rHC83 | | 748 | EVQLVESGGGLVQPGGSLRLSCAASGFTFS |
| VH | | | NYGVTWVRQAPGKGLEWVSMIWADGSTHYA |
| | | | SSVKGRFTISRDNSKNTLYLQMNSLRAEDT |
| | | | AVYYCAREWQHGPVAYWGQGTLVTVSS |
| rHC83 | CDR-H1 | Residues 31-35 | NYGVT |
| VH | | of SEQ ID | |
| | | NO.: 748 | |
| rHC83 | CDR-H2 | Residues 50-65 | MIWADGSTHYASSVKG |
| VH | | of SEQ ID | |
| | | NO.: 748 | |
| rHC83 | CDR-H3 | Residues 98-106 | EWQHGPVAY |
| VH | | of SEQ ID | |
| | | NO.: 748 | |
| S4-19 | | 749 | EVQLVESGGGLVQPGGSLRLSCAASGFTFS |
| VH | | | NYGVEWVRQAPGKGLEWVSGIWADGSTHYA |
| | | | DTVKSRFTISRDNSKNTLYLQMNSLRAEDT |
| | | | AVYYCAREWQHGPVAYWGQGTLVTVSS |
| S4-19 | CDR-H1 | Residues 31-35 | NYGVE |
| VH | | of SEQ ID | |
| | | NO.: 749 | |
| S4-19 | CDR-H2 | Residues 50-65 | GIWADGSTHYADTVKS |
| VH | | of SEQ ID | |
| | | NO.: 749 | |
| S4-19 | CDR-H3 | Residues 98-106 | EWQHGPVAY |
| VH | | of SEQ ID | |
| | | NO.: 749 | |
| S4-50 | | 750 | EVQLVESGGGLVQPGGSLRLSCAASGFTFS |
| VH | | | NYGVEWVRQAPGKGLEWVSGIWADGSTHYA |
| | | | DTVKSRFTISRDNSKNTLYLQMNSLRAEDT |
| | | | AVYYCAREWQHGPVGYWGQGTLVTVSS |
| S4-50 | CDR-H1 | Residues 31-35 | NYGVE |
| VH | | of SEQ ID | |
| | | NO.: 750 | |
| S4-50 | CDR-H2 | Residues 50-65 | GIWADGSTHYADTVKS |
| VH | | of SEQ ID | |
| | | NO.: 750 | |
| S4-50 | CDR-H3 | Residues 98-106 | EWQHGPVGY |
| VH | | of SEQ ID | |
| | | NO.: 750 | |
| S4-63 | | 751 | EVQLVESGGGLVQPGGSLRLSCAASGFTFS |
| VH | | | NYGVEWVRQAPGKGLEWVSGIWADGSTHYA |
| | | | DTVKSRFTISRDNSKNTLYLQMNSLRAEDT |
| | | | AVYYCAREWQHGPVGYWGQGTLVTVSS |
| S4-63 | CDR-H1 | Residues 31-35 | NYGVE |
| VH | | of SEQ ID | |
| | | NO.: 751 | |
| S4-63 | CDR-H2 | Residues 50-65 | GIWADGSTHYADTVKS |
| VH | | of SEQ ID | |
| | | NO.: 751 | |
| S4-63 | CDR-H3 | Residues 98-106 | EWQHGPVGY |
| VH | | of SEQ ID | |
| | | NO.: 751 | |
| S4-55 | | 752 | EVQLVESGGGLVQPGGSLRLSCAASGFTFS |
| VH | | | NYGVTWVRQAPGKGLEWVSMIWADGSTDYA |
| | | | STVKGRFTISRDNSKNTLYLQMNSLRAEDT |
| | | | AVYYCAREWQHGPVGYWGQGTLVTVSS |
| S4-55 | CDR-H1 | Residues 31-35 | NYGVT |
| VH | | of SEQ ID | |
| | | NO.: 752 | |
| S4-55 | CDR-H2 | Residues 50-65 | MIWADGSTDYASTVKG |
| VH | | of SEQ ID | |
| | | NO.: 752 | |
| S4-55 | CDR-H3 | Residues 98-106 | EWQHGPVGY |
| VH | | of SEQ ID | |
| | | NO.: 752 | |
| S4-6 | | 753 | EVQLVESGGGLVQPGGSLRLSCAASGFTFS |
| VH | | | NYGVTWVRQAPGKGLEWVSMIWADGSTHYA |
| | | | SSVKGRFTISRDNSKNTLYLQMNSLRAEDT |
| | | | AVYYCAREWQHGPVAYWGQGTLVTVSS |
| S4-6 | CDR-H1 | Residues 31-35 | NYGVT |
| VH | | of SEQ ID | |
| | | NO.: 753 | |
| S4-6 | CDR-H2 | Residues 50-65 | MIWADGSTHYASSVKG |
| VH | | of SEQ ID | |
| | | NO.: 753 | |
| S4-6 | CDR-H3 | Residues 98-106 | EWQHGPVAY |
| VH | | of SEQ ID | |
| | | NO.: 753 | |
| S4-18 | | 754 | EVQLVESGGGLVQPGGSLRLSCAASGFTFS |
| VH | | | NYGVTWVRQAPGKGLEWVSMIWADGSTHYA |
| | | | DSVKSRFTISRDNSKNTLYLQMNSLRAEDT |
| | | | AVYYCAREWQHGPLAYWGQGTLVTVSS |
| S4-18 | CDR-H1 | Residues 31-35 | NYGVT |
| VH | | of SEQ ID | |
| | | NO.: 754 | |
| S4-18 | CDR-H2 | Residues 50-65 | MIWADGSTHYADSVKS |
| VH | | of SEQ ID | |
| | | NO.: 754 | |
| S4-18 | CDR-H3 | Residues 98-106 | EWQHGPLAY |
| VH | | of SEQ ID | |
| | | NO.: 754 | |
| S4-31 | | 755 | EVQLVESGGGLVQPGGSLRLSCAASGFTFS |
| VH | | | NYGVQWVRQAPGKGLEWVSGIGADGSTAYA |
| | | | SSLKGRFTISRDNSKNTLYLQMNSLRAEDT |
| | | | AVYYCAREWQHSGLAYWGQGTLVTVSS |
| S4-31 | CDR-H1 | Residues 31-35 | NYGVQ |
| VH | | of SEQ ID | |
| | | NO.: 755 | |
| S4-31 | CDR-H2 | Residues 50-65 | GIGADGSTAYASSLKG |
| VH | | of SEQ ID | |
| | | NO.: 755 | |
| S4-31 | CDR-H3 | Residues 98-106 | EWQHSGLAY |
| VH | | of SEQ ID | |
| | | NO.: 755 | |
| S4-34 | | 756 | EVQLVESGGGLVQPGGSLRLSCAASGFTFS |
| VH | | | NYGVSWVRQAPGKGLEWVSMIWADGSTHYA |
| | | | DTVKGRFTISRDNSKNTLYLQMNSLRAEDT |
| | | | AVYYCAREWQHGPLAYWGQGTLVTVSS |
| S4-34 | CDR-H1 | Residues 31-35 | NYGVS |
| VH | | of SEQ ID | |
| | | NO.: 756 | |
| S4-34 | CDR-H2 | Residues 50-65 | MIWADGSTHYADTVKG |
| VH | | of SEQ ID | |
| | | NO.: 756 | |
| S4-34 | CDR-H3 | Residues 98-106 | EWQHGPLAY |
| VH | | of SEQ ID | |
| | | NO.: 756 | |
| S4-74 | | 757 | EVQLVESGGGLVQPGGSLRLSCAASGFTFS |
| VH | | | NYGVTWVRQAPGKGLEWVSMIWADGSTHYA |
| | | | DTVKGRFTISRDNSKNTLYLQMNSLRAEDT |
| | | | AVYYCAREWQHGPLAYWGQGTLVTVSS |
| S4-74 | CDR-H1 | Residues 31-35 | NYGVT |
| VH | | of SEQ ID | |
| | | NO.: 757 | |
| S4-74 | CDR-H2 | Residues 50-65 | MIWADGSTHYADTVKG |
| VH | | of SEQ ID | |
| | | NO.: 757 | |
| S4-74 | CDR-H3 | Residues 98-106 | EWQHGPLAY |
| VH | | of SEQ ID | |
| | | NO.: 757 | |
| S4-12 | | 758 | EVQLVESGGGLVQPGGSLRLSCAASGFTFS |
| VH | | | NYGVTWVRQAPGKGLEWVSMIWADGSTHYA |
| | | | SSVKGRFTISRDNSKNTLYLQMNSLRAEDT |
| | | | AVYYCAREWQHGPVAYWGQGTLVTVSS |
| S4-12 | CDR-H1 | Residues 31-35 | NYGVT |
| VH | | of SEQ ID | |
| | | NO.: 758 | |
| S4-12 | CDR-H2 | Residues 50-65 | MIWADGSTHYASSVKG |
| VH | | of SEQ ID | |
| | | NO.: 758 | |
| S4-12 | CDR-H3 | Residues 98-106 | EWQHGPVAY |
| VH | | of SEQ ID | |
| | | NO.: 758 | |
| S4-54 | | 759 | EVQLVESGGGLVQPGGSLRLSCAASGFTFS |
| VH | | | NYGVTWVRQAPGKGLEWVSMIWADGSTHYA |
| | | | SSVKGRFTISRDNSKNTLYLQMNSLRAEDT |
| | | | AVYYCAREWQHGPVAYWGQGTLVTVSS |
| S4-54 | CDR-H1 | Residues 31-35 | NYGVT |
| VH | | of SEQ ID | |
| | | NO.: 759 | |
| S4-54 | CDR-H2 | Residues 50-65 | MIWADGSTHYASSVKG |
| VH | | of SEQ ID | |
| | | NO.: 759 | |
| S4-54 | CDR-H3 | Residues 98-106 | EWQHGPVAY |
| VH | | of SEQ ID | |
| | | NO.: 759 | |
| S4-17 | | 760 | EVQLVESGGGLVQPGGSLRLSCAASGFTFS |
| VH | | | NYGVTWVRQAPGKGLEWVSMIWADGSTHYA |
| | | | SSVKGRFTISRDNSKNTLYLQMNSLRAEDT |
| | | | AVYYCAREWQHGPVAYWGQGTLVTVSS |
| S4-17 | CDR-H1 | Residues 31-35 | NYGVT |
| VH | | of SEQ ID | |
| | | NO.: 760 | |
| S4-17 | CDR-H2 | Residues 50-65 | MIWADGSTHYASSVKG |
| VH | | of SEQ ID | |
| | | NO.: 760 | |
| S4-17 | CDR-H3 | Residues 98-106 | EWQHGPVAY |
| VH | | of SEQ ID | |
| | | NO.: 760 | |
| S4-40 | | 761 | EVQLVESGGGLVQPGGSLRLSCAASGFTFS |
| VH | | | NYGVTWVRQAPGKGLEWVSMIWADGSTHYA |
| | | | SSVKGRFTISRDNSKNTLYLQMNSLRAEDT |
| | | | AVYYCAREWQHGPVAYWGQGTLVTVSS |
| S4-40 | CDR-H1 | Residues 31-35 | NYGVT |
| VH | | of SEQ ID | |
| | | NO.: 761 | |
| S4-40 | CDR-H2 | Residues 50-65 | MIWADGSTHYASSVKG |
| VH | | of SEQ ID | |
| | | NO.: 761 | |
| S4-40 | CDR-H3 | Residues 98-106 | EWQHGPVAY |
| VH | | of SEQ ID | |
| | | NO.: 761 | |
| S4-24 | | 762 | EVQLVESGGGLVQPGGSLRLSCAASGFTFS |
| VH | | | NYGVTWVRQAPGKGLEWVSMIWADGSTHYA |
| | | | SSVKGRFTISRDNSKNTLYLQMNSLRAEDT |
| | | | AVYYCAREWQHGPVAYWGQGTLVTVSS |
| S4-24 | CDR-H1 | Residues 31-35 | NYGVT |
| VH | | of SEQ ID | |
| | | NO.: 762 | |
| S4-24 | CDR-H2 | Residues 50-65 | MIWADGSTHYASSVKG |
| VH | | of SEQ ID | |
| | | NO.: 762 | |
| S4-24 | CDR-H3 | Residues 98-106 | EWQHGPVAY |
| VH | | of SEQ ID | |
| | | NO.: 762 | |

TABLE 23
VL sequences of IgG converted clones

| Protein | | | |
|---|---|---|---|
| region | | SEQ ID NO: | Sequence |
| | | | 123456789012345678901234567890 |
| hMAK195 | | 763 | DIQMTQSPSSLSASVGDRVTITCKASQAVS |
| VL.1 | | | SAVAWYQQKPGKAPKLLIYWASTRHTGVPS |
| VL | | | RFSGSGSGTDFTLTISSLQPEDFATYYCQQ |
| | | | HYSTPFTFGQGTKLEIKR |
| hMAK195 | CDR-L1 | Residues 24-34 | KASQAVSSAVA |
| VL.1 | | of SEQ ID | |
| VL | | NO.: 763 | |
| hMAK195 | CDR-L2 | Residues 50-56 | WASTRHT |
| VL.1 | | of SEQ ID | |
| VL | | NO.: 763 | |
| hMAK195 | CDR-L3 | Residues 89-97 | QQHYSTPFT |
| VL.1 | | of SEQ ID | |
| VL | | NO.: 763 | |
| S4-24 | | 764 | DIQMTQSPSSLSASVGDRVTITCRASQLVS |
| VL | | | SAVAWYQQKPGKAPKLLIYWASTLHTGVPS |
| | | | RFSGSGSGTDFTLTISSLQPEDFATYYCQQ |
| | | | HYRTPFTFGQGTKLEIKR |
| S4-24 | CDR-L1 | Residues 24-34 | RASQLVSSAVA |
| VL | | of SEQ ID | |
| | | NO.: 764 | |
| S4-24 | CDR-L2 | Residues 50-56 | WASTLHT |
| VL | | of SEQ ID | |
| | | NO.: 764 | |
| S4-24 | CDR-L3 | Residues 89-97 | QQHYRTPFT |
| VL | | of SEQ ID | |
| | | NO.: 764 | |
| S4-40 | | 765 | DIQMTQSPSSLSASVGDRVTITCRASQLVS |
| VL | | | SAVAWYQQKPGKAPKLLIYWASTRHSGVPS |
| | | | RFSGSGSGTDFTLTISSLQPEDFATYYCQQ |
| | | | HYRTPFSFGQGTKLEIKR |
| S4-40 | CDR-L1 | Residues 24-34 | RASQLVSSAVA |
| VL | | of SEQ ID | |
| | | NO.: 765 | |
| S4-40 | CDR-L2 | Residues 50-56 | WASTRHS |
| VL | | of SEQ ID | |
| | | NO.: 765 | |
| S4-40 | CDR-L3 | Residues 89-97 | QQHYRTPFS |
| VL | | of SEQ ID | |
| | | NO.: 765 | |
| S4-17 | | 766 | DIQMTQSPSSLSASVGDRVTITCRASQLVS |
| VL | | | SAVAWYQQKPGKAPKLLIYWASTRHSGVPS |
| | | | RFSGSGSGTDFTLTISSLQPEDFATYYCQQ |
| | | | HYRTPFTFGQGTKLEIKR |
| S4-17 | CDR-L1 | Residues 24-34 | RASQLVSSAVA |
| VL | | of SEQ ID | |
| | | NO.: 766 | |
| S4-17 | CDR-L2 | Residues 50-56 | WASTRHS |
| VL | | of SEQ ID | |
| | | NO.: 766 | |
| S4-17 | CDR-L3 | Residues 89-97 | QQHYRTPFT |
| VL | | of SEQ ID | |
| | | NO.: 766 | |
| S4-54 | | 767 | DIQMTQSPSSLSASVGDRVTITCRASQLVS |
| VL | | | SAVAWYQQKPGKAPKLLIYWASARHTGVPS |
| | | | RFSGSGSGTDFTLTISSLQPEDFATYYCQQ |
| | | | HYKTPFSFGQGTKLEIKR |
| S4-54 | CDR-L1 | Residues 24-34 | RASQLVSSAVA |
| VL | | of SEQ ID | |
| | | NO.: 767 | |
| S4-54 | CDR-L2 | Residues 50-56 | WASARHT |
| VL | | of SEQ ID | |
| | | NO.: 767 | |
| S4-54 | CDR-L3 | Residues 89-97 | QQHYKTPFS |
| VL | | of SEQ ID | |
| | | NO.: 767 | |
| S4-12 | | 768 | DIQMTQSPSSLSASVGDRVTITCRASQLVS |
| VL | | | SAVAWYQQKPGKAPKLLIYWASARHTGVPS |
| | | | RFSGSGSGTDFTLTISSLQPEDFATYYCQQ |
| | | | HYKTPFTFGQGTKLEIKR |
| S4-12 | CDR-L1 | Residues 24-34 | RASQLVSSAVA |
| VL | | of SEQ ID | |
| | | NO.: 768 | |
| S4-12 | CDR-L2 | Residues 50-56 | WASARHT |
| VL | | of SEQ ID | |
| | | NO.: 768 | |
| S4-12 | CDR-L3 | Residues 89-97 | QQHYKTPFT |
| VL | | of SEQ ID | |
| | | NO.: 768 | |
| S4-74 | | 769 | DIQMTQSPSSLSASVGDRVTITCRASQLVS |
| VL | | | SAVAWYQQKPGKAPKLLIYWASARHTGVPS |
| | | | RFSGSGSGTDFTLTISSLQPEDFATYYCQQ |
| | | | HYRTPFTFGQGTKLEIKR |
| S4-74 | CDR-L1 | Residues 24-34 | RASQLVSSAVA |
| VL | | of SEQ ID | |
| | | NO.: 769 | |
| S4-74 | CDR-L2 | Residues 50-56 | WASARHT |
| VL | | of SEQ ID | |
| | | NO.: 769 | |
| S4-74 | CDR-L3 | Residues 89-97 | QQHYRTPFT |
| VL | | of SEQ ID | |
| | | NO.: 769 | |
| S4-34 | | 770 | DIQMTQSPSSLSASVGDRVTITCRASQLVS |
| VL | | | SAVAWYQQKPGKAPKLLIYWASTRHTGVPS |
| | | | RFSGSGSGTDFTLTISSLQPEDFATYYCQQ |
| | | | HYRTPFTFGQGTKLEIKR |
| S4-34 | CDR-L1 | Residues 24-34 | RASQLVSSAVA |
| VL | | of SEQ ID | |
| | | NO.: 770 | |
| S4-34 | CDR-L2 | Residues 50-56 | WASTRHT |
| VL | | of SEQ ID | |
| | | NO.: 770 | |
| S4-34 | CDR-L3 | Residues 89-97 | QQHYRTPFT |
| VL | | of SEQ ID | |
| | | NO.: 770 | |
| S4-31 | | 771 | DIQMTQSPSSLSASVGDRVTITCRASQGVS |
| VL | | | SALAWYQQKPGKAPKLLIYWASALHSGVPS |
| | | | RFSGSGSGTDFTLTISSLQPEDFATYYCQQ |
| | | | HYSAPFTFGQGTKLEIKR |
| S4-31 | CDR-L1 | Residues 24-34 | RASQGVSSALA |
| VL | | of SEQ ID | |
| | | NO.: 771 | |
| S4-31 | CDR-L2 | Residues 50-56 | WASALHS |
| VL | | of SEQ ID | |
| | | NO.: 771 | |
| S4-31 | CDR-L3 | Residues 89-97 | QQHYSAPFT |
| VL | | of SEQ ID | |
| | | NO.: 771 | |
| S4-18 | | 772 | DIQMTQSPSSLSASVGDRVTITCRASQLVS |
| VL | | | SAVAWYQQKPGKAPKLLIYWASTLHSGVPS |
| | | | RFSGSGSGTDFTLTISSLQPEDFATYYCQQ |
| | | | HYSTPFTFGQGTKLEIKR |
| S4-18 | CDR-L1 | Residues 24-34 | RASQLVSSAVA |
| VL | | of SEQ ID | |
| | | NO.: 772 | |
| S4-18 | CDR-L2 | Residues 50-56 | WASTLHS |
| VL | | of SEQ ID | |
| | | NO.: 772 | |
| S4-18 | CDR-L3 | Residues 89-97 | QQHYSTPFT |
| VL | | of SEQ ID | |
| | | NO.: 772 | |
| S4-6 | | 773 | DIQMTQSPSSLSASVGDRVTITCKASQLVS |
| VL | | | SAVAWYQQKPGKAPKLLIYWASTRHTGVPS |
| | | | RFSGSGSGTDFTLTISSLQPEDFATYYCQQ |
| | | | HYSTPFTFGQGTKLEIKR |
| S4-6 | CDR-L1 | Residues 24-34 | KASQLVSSAVA |
| VL | | of SEQ ID | |
| | | NO.: 773 | |
| S4-6 | CDR-L2 | Residues 50-56 | WASTRHT |
| VL | | of SEQ ID | |
| | | NO.: 773 | |
| S4-6 | CDR-L3 | Residues 89-97 | QQHYSTPFT |
| VL | | of SEQ ID | |
| | | NO.: 773 | |
| S4-55 | | 774 | DIQMTQSPSSLSASVGDRVTITCKASQLVS |
| VL | | | SAVAWYQQKPGKAPKLLIYWASTLHTGVPS |
| | | | RFSGSGSGTDFTLTISSLQPEDFATYYCQQ |
| | | | HYRTPFTFGQGTKLEIKR |
| S4-55 | CDR-L1 | Residues 24-34 | KASQLVSSAVA |
| VL | | of SEQ ID | |
| | | NO.: 774 | |
| S4-55 | CDR-L2 | Residues 50-56 | WASTLHT |
| VL | | of SEQ ID | |
| | | NO.: 774 | |
| S4-55 | CDR-L3 | Residues 89-97 | QQHYRTPFT |
| VL | | of SEQ ID | |
| | | NO.: 774 | |
| S4-63 | | 775 | DIQMTQSPSSLSASVGDRVTITCKASQKVS |
| VL | | | SALAWYQQKPGKAPKLLIYWASALHSGVPS |
| | | | RFSGSGSGTDFTLTISSLQPEDFATYYCQQ |
| | | | HYRPPFTFGQGTKLEIKR |
| S4-63 | CDR-L1 | Residues 24-34 | KASQKVSSALA |
| VL | | of SEQ ID | |
| | | NO.: 775 | |
| S4-63 | CDR-L2 | Residues 50-56 | WASALHS |
| VL | | of SEQ ID | |
| | | NO.: 775 | |
| S4-63 | CDR-L3 | Residues 89-97 | QQHYRPPFT |
| VL | | of SEQ ID | |
| | | NO.: 775 | |
| S4-50 | | 776 | DIQMTQSPSSLSASVGDRVTITCKASQLVS |
| VL | | | SAVAWYQQKPGKAPKLLIYWASALHTGVPS |
| | | | RFSGSGSGTDFTLTISSLQPEDFATYYCQQ |
| | | | HYSSPYTFGQGTKLEIKR |
| S4-50 | CDR-L1 | Residues 24-34 | KASQLVSSAVA |
| VL | | of SEQ ID | |
| | | NO.: 776 | |
| S4-50 | CDR-L2 | Residues 50-56 | WASALHT |
| VL | | of SEQ ID | |
| | | NO.: 776 | |
| S4-50 | CDR-L3 | Residues 89-97 | QQHYSSPYT |
| VL | | of SEQ ID | |
| | | NO.: 776 | |
| S4-19 | | 777 | DIQMTQSPSSLSASVGDRVTITCKASQLVS |
| VL | | | SAVAWYQQKPGKAPKLLIYWASTLHTGVPS |
| | | | RFSGSGSGTDFTLTISSLQPEDFATYYCQQ |
| | | | HYRTPFTFGQGTKLEIKR |
| S4-19 | CDR-L1 | Residues 24-34 | KASQLVSSAVA |
| VL | | of SEQ ID | |
| | | NO.: 777 | |
| S4-19 | CDR-L2 | Residues 50-56 | WASTLHT |
| VL | | of SEQ ID | |
| | | NO.: 777 | |
| S4-19 | CDR-L3 | Residues 89-97 | QQHYRTPFT |
| VL | | of SEQ ID | |
| | | NO.: 777 | |

TABLE 24
Heavy and light chain pairs of hMAK195 affinity matured clones

| Clone name | HC | LC | Protein name |
|---|---|---|---|
| A8 | hMAK195-A8 | hMAK195 VL.1 | hMAK195-AM11 |
| B5 | hMAK195-B5 | hMAK195 VL.1 | hMAK195-AM13 |
| rHC3 | hMAK195 rHC3 | hMAK195 VL.1 | hMAK195-AM14 |
| rHC18 | hMAK195 rHC18 | hMAK195 VL.1 | hMAK195-AM15 |
| rHC19 | hMAK195 rHC19 | hMAK195 VL.1 | hMAK195-AM16 |
| rHC22 | hMAK195 rHC22 | hMAK195 VL.1 | hMAK195-AM17 |
| rHC34 | hMAK195 rHC34 | hMAK195 VL.1 | hMAK195-AM18 |
| rHC60 | hMAK195 rHC60 | hMAK195 VL.1 | hMAK195-AM19 |
| S4-6 | hMAK195 S4-6 | hMAK195 S4-6 | hMAK195-AM20 |
| S4-12 | hMAK195 S4-12 | hMAK195 S4-12 | hMAK195-AM21 |
| S4-17 | hMAK195 S4-17 | hMAK195 S4-17 | hMAK195-AM22 |
| S4-18 | hMAK195 S4-18 | hMAK195 S4-18 | hMAK195-AM23 |
| S4-19 | hMAK195 S4-19 | hMAK195 S4-19 | hMAK195-AM24 |
| S4-24 | hMAK195 S4-24 | hMAK195 S4-24 | hMAK195-AM25 |
| S4-34 | hMAK195 S4-34 | hMAK195 S4-34 | hMAK195-AM26 |

### 2.1 TNF Enzyme-Linked Immunosorbent Assay Result

TABLE 25

| IgG Name | EC50 in hTNFa ELISA (nM) |
|---|---|
| hMAK195-AM11 | 0.2 |
| hMAK195-AM13 | 0.2 |
| hMAK195-AM14 | 0.051 |
| hMAK195-AM15 | 0.052 |
| hMAK195-AM16 | 0.056 |
| hMAK195-AM17 | 0.056 |
| hMAK195-AM18 | 0.052 |
| hMAK195-AM19 | 0.057 |
| hMAK195-AM20 | 0.043 |
| hMAK195-AM21 | 0.042 |
| hMAK195-AM22 | 0.052 |
| hMAK195-AM23 | 0.055 |
| hMAK195-AM24 | 0.053 |
| hMAK195-AM25 | 0.052 |
| hMAK195-AM26 | 0.061 |

### 2.2 TNF Neutralization Potency of TNF Antibodies by L929 Bioassay

TABLE 26

| | hu TNF neutralization | rhesus TNF neutralization |
|---|---|---|
| IgG Name | IC50 (nM) | IC50 (nM) |
| hMAK195-AM11 | 0.259 | >25 |
| hMAK195-AM13 | 1.218 | 4.64 |
| hMAK195-AM14 | 0.0401 | 4.61 |
| hMAK195-AM15 | 0.036 | >150 |
| hMAK195-AM16 | 0.0105 | 0.803 |
| hMAK195-AM17 | 0.0031 | >25 |
| hMAK195-AM18 | 0.0145 | 0.4412 |
| hMAK195-AM19 | 0.0126 | 1.206 |
| hMAK195-AM20 | 0.0037 | 0.596 |
| hMAK195-AM21 | 0.009 | 0.09 |
| hMAK195-AM22 | 0.00345 | 0.2705 |
| hMAK195-AM23 | 0.0468 | 2.627 |
| hMAK195-AM24 | 0.015 | 0.557 |
| hMAK195-AM25 | 0.0114 | 0.262 |
| hMAK195-AM26 | 0.0061 | 0.2495 |

### Example 3

### Affinity Maturation of a Humanized Anti-Human TNF Antibody hMAK-199

[0117] The mouse anti-human TNF antibody MAK-199 was humanized and affinity-matured to generate a panel of humanized MAK195 variants that have improved affinity and binding kinetics against both human and cyno TNF. Several libraries were made according to specifications below:
[0118] Three HC libraries were made after the V2I back-mutation was first introduced and confirmed that it did not impact scFv affinity to TNF.
[0119] H1+H2 (DDK) library:
[0120] Limited mutagenesis at 7 residues (T30, N31, N35, T52a, T54, E56, T58)
[0121] Germline toggle: M34I and F63L
[0122] H1+H2 (QKQ) library:
[0123] Limited mutagenesis at 7 residues (T30, N31, N35, T52a, T54, E56, T58)
[0124] Germline toggle: M34I and F63L
[0125] Germline back-mutations: D61Q, D62K, K64Q, F67V, F69M, L71T
[0126] H3 library:
[0127] Limited mutagenesis at 12 residues 95-100, 100a-100f
[0128] Germline toggle: F91Y
[0129] LC library: library
[0130] Limited mutagenesis at 11 residues 28, 30-32, 50, 53, 91-94, 96
[0131] Germline toggles: T51A, Y71F, F87Y, and T43A/V44P (these two co-evolve)
[0132] Recombined libraries:
[0133] VH libraries will be recombined with and without VL library after library diversity is reduced after at least 3 rounds of selection.

[0134] All four libraries were selected separately for the ability to bind human or cynomolgus monkey TNF in the presence of decreasing concentrations of biotinylated human or cynomolgus monkey TNF antigens. All mutated CDR sequences recovered from library selections were recombined into additional libraries and the recombined libraries were subjected to more stringent selection conditions before individual antibodies are identified.

[0135] Table 27 provides a list of amino acid sequences of VH of the hMAK-199 antibody which were subjected to the affinity maturation selection protocol Amino acid residues of individual CDRs of each VH sequence are indicated in bold.

TABLE 27
List of amino acid sequences of affinity matured hMAK199
VH variants

| Clone | SEQ ID NO: | VH |
|---|---|---|
| J644M2S1-10VH | 778 | EVQLVQSGAEVKKPGASVKVSCKASGYTFNDYGITWVRQ |
| | | APGQGLEWMGWINTYTGKPTYAQGFTGRVTMTTDTSTST |
| | | AYMELSSLRSEDTAVYFCARKFLTTVVVTDYAMDYWGQG |
| | | TTVTVSS |
| J644M2S1-11VH | 779 | EVQLVQSGAEVKKPGASVKVSCKASGYTFTNYGMNWVRQ |
| | | APGQGLEWMGWINTYTGEPTYADDFKGRFTFTLDTSTST |
| | | AYMELSSLRSEDTAVYFCARKFLTTVVVTDYAMDYWGQG |
| | | TTVTVSS |
| J644M2S1-12VH | 780 | EVQLVQSGAEVKKPGASVKVSCKASGYTFTNYGISWVRQ |
| | | APGQGLEWMGWINTYTGEPHYAQGLTGRVTMTTDTSTST |
| | | AYMELSSLRSEDTAVYFCARKFLTTVVVTDYAMDYWGQG |
| | | TTVTVSS |
| J644M2S1-13VH | 781 | EVQLVQSGAEVKKPGASVKVSCKASGYTFDNYGIQWVRQ |
| | | APGQGLEWMGWINTYTGAPSYAQGFTGRVTMTTDTSTST |
| | | AYMELSSLRSEDTAVYFCARKFLTTVVVTDYAMDYWGQG |
| | | TTVTVSS |
| J644M2S1-14VH | 782 | EVQLVQSGAEVKKPGASVKVSCKASGYTFTDYGINWVRQ |
| | | APGQGLEWMGWINTYTGKPSYAQGFTGRVTMTTDTSTST |
| | | AYMELSSLRSEDTAVYFCARKFLTTVVVTDYAMDYWGQG |
| | | TTVTVSS |
| J644M2S1-15VH | 783 | EVQLVQSGAEVKKPGASVKVSCKASGYTFSNYGMNWVRQ |
| | | APGQGLEWMGWINTYTGESTYAQGFTGRVTMTTDTSTST |
| | | AYMELSSLRSEDTAVYFCARKFLTTVVVTDYAMDYWGQG |
| | | TTVTVSS |
| J644M2S1-16VH | 784 | EVQLVQSGAEVKKPGASVKVSCKASGYTFKNYGMTWVRQ |
| | | APGQGLEWMGWINTYTGKPTYAQGFTGRVTMTTDTSTST |
| | | AYMELSSLRSEDTAVYFCARKFLTTVVVTDYAMDYWGQG |
| | | TTVTVSS |
| J644M2S1-17VH | 785 | EVQLVQSGAEVKKPGASVKVSCKASGYAFTDYGINWVRQ |
| | | APGQGLEWMGWINTYTGKPTYAQGFTGRVTMTTDTSTST |
| | | AYMELSSLRSEDTAVYFCARKFLTTVVVTDYAMDYWGQG |
| | | TTVTVSS |
| J644M2S1-18VH | 786 | EVQLVQSGAEVKKPGASVKVSCKASGYTFNNYGINWVRQ |
| | | APGQGLEWMGWINTYTGEPAYAQGFTGRVTMTTDTSTST |
| | | AYMELSSLRSEDTAVYFCARKFLTTVVVTDYAMDYWGQG |
| | | TTVTVSS |
| J644M2S1-1VH | 787 | EVQLVQSGAEVKKPGASVKVSCKASGYTFRNYGINWVRQ |
| | | APGQGLEWMGWINTYTGQPTYAQGFTGRVTMTTDTSTST |
| | | AYMELSSLRSEDTAVYFCARKFLTTVVVTDYAMDYWGQG |
| | | TTVTVSS |
| J644M2S1-22VH | 788 | EVQLVQSGAEVKKPGASVKVSCKASGYTFTDYGINWVRQ |
| | | APGQGLEWMGWINTYTGEPTYAQGFTGRVTMTTDTSTST |
| | | AYMELSSLRSEDTAVYFCARKFLTTVVVTDYAMDYWGQG |
| | | TTVTVSS |
| J644M2S1-23VH | 789 | EVQLVQSGAEVKKPGASVKVSCKASGYTFKNYGIIWVRQ |
| | | APGQGLEWMGWINTYTGKPTYAQGFTGRVTMTTDTSTST |
| | | AYMELSSLRSEDTAVYFCARKFLTTVVVTDYAMDYWGQG |
| | | TTVTVSS |
| J644M2S1-24VH | 790 | EVQLVQSGAEVKKPGASVKVSCKASGYTFSNYGINWVRQ |
| | | APGQGLEWMGWINTYTGVPTYAQGFTGRVTMTTDTSTST |
| | | AYMELSSLRSEDTAVYFCARKFLTTVVVTDYAMDYWGQG |
| | | TTVTVSS |
| J644M2S1-25VH | 791 | EVQLVQSGAEVKKPGASVKVSCKASGYTFNNYGINWVRQ |
| | | APGQGLEWMGWINTYTGKPSYAQGFTGRVTMTTDTSTST |
| | | AYMELSSLRSEDTAVYFCARKFLTTVVVTDYAMDYWGQG |
| | | TTVTVSS |
| J644M2S1-27VH | 792 | EVQLVQSGAEVKKPGASVKVSCKASGYTFKNYGINWVRQ |
| | | APGQGLEWMGWINTYTGKPTYAQGLTGRVTMTTDTSTST |
| | | AYMELSSLRSEDTAVYFCARKFLTTVVVTDYAMDYWGQG |
| | | TTVTVSS |
| J644M2S1-28VH | 793 | EVQLVQSGAEVKKPGASVKVSCKASGYTFRNYGINWVRQ |
| | | APGQGLEWMGWINTYTGKPSYAQGFTGRVTMTTDTSTST |
| | | AYMELSSLRSEDTAVYFCARKFLTTVVVTDYAMDYWGQG |
| | | TTVTVSS |
| J644M2S1-2VH | 794 | EVQLVQSGAEVKKPGASVKVSCKASGYTFTNYGIXWVRQ |
| | | APGQGLEWMGWINTYXGKPTYAQGFTGRVTMTTDTSTST |
| | | AYMELSSLRSEDTAVYFCARKFLTTVVVTDYAMDYWGQG |
| | | TTVTVSS |
| J644M2S1-31VH | 795 | EVQLVQSGAEVKKPGASVKVSCKASGYTFNNYGINWVRQ |
| | | APGQGLEWMGWINTYTGEPHYAQGLTGRVTMTTDTSTST |
| | | AYMELSSLRSEDTAVYFCARKFLTTVVVTDYAMDYWGQG |
| | | TTVTVSS |
| J644M2S1-33VH | 796 | EVQLVQSGAEVKKPGASVKVSCKASGYTFTHYGINWVRQ |
| | | APGQGLEWMGWINTYTGKPTYAQGFTGRVTMTTDTSTST |
| | | AYMELSSLRSEDTAVYFCARKFLTTVVVTDYAMDYWGQG |
| | | TTVTVSS |
| J644M2S1-34VH | 797 | EVQLVQSGAEVKKPGASVKVSCKASGYTFTHYGINWVRQ |
| | | APGQGLEWMGWINTYTGQPTYAQGLTGRVTMTTDTSTST |
| | | AYMELSSLRSEDTAVYFCARKFLTTVVVTDYAMDYWGQG |
| | | TTVTVSS |
| J644M2S1-35VH | 798 | EVQLVQSGAEVKKPGASVKVSCKASGYTFTNYGITWVRQ |
| | | APGQGLEWMGWINTYTGKPTYAQGFTGRVTMTTDTSTST |
| | | AYMELSSLRSEDTAVYFCARKFLTTVVVTDYAMDYWGQG |
| | | TTVTVSS |
| J644M2S1-36VH | 799 | EVQLVQSGAEVKKPGASVKVSCKASGYTFGNYGINWVRQ |
| | | APGQGLEWMGWINTYTGKPSYAQGFTGRVTMTTDTSTST |
| | | AYMELSSLRSEDTAVYFCARKFLTTVVVTDYAMDYWGQG |
| | | TTVTVSS |
| J644M2S1-37VH | 800 | EVQLVQSGAEVKKPGASVKVSCKASGYTFSNYGINWVRQ |
| | | APGQGLEWMGWINTYTGRPTYAQGFTGRVTMTTDTSTST |
| | | AYMELSSLRSEDTAVYFCARKFLTTVVVTDYAMDYWGQG |
| | | TTVTVSS |
| J644M2S1-38VH | 801 | EVQLVQSGAEVKKPGASVKVSCKASGYTFKNYGINWVRQ |
| | | APGQGLEWMGWINTYTGEPHYAQGFTGRVTMTTDTSTST |
| | | AYIELSSLRSEDTAVYFCARKFLTTVVVTDYAMDYWGQG |
| | | TTVTVSS |
| J644M2S1-3VH | 802 | EVQLVQSGAEVKKPGASVKVSCKASGYTFTNYGINWVRQ |
| | | APGQGLEWMGWINTYTGEPSYAQGFTGRVTMTTDTSTST |
| | | AYMELSSLRSEDTAVYFCARKFLTTVVVTDYAMDYWGQG |
| | | TTVTVSS |
| J644M2S1-40VH | 803 | EVQLVQSGAEVKKPGASVKVSCKASGYTFSNYGMNWVRQ |
| | | APGQGLEWMGWINTYTGEPTYAQGFTGRVTMTTDTSTST |
| | | AYMELSSLRSEDTAVYFCARKFLTTVVVTDYAMDYWGQG |
| | | TTVTVSS |
| J644M2S1-41VH | 804 | EVQLVQSGAEVKKPGASVKVSCKASGYTFTNYGIGWVRQ |
| | | APGQGLEWMGWINTYTGKPSYAQGFTGRVTMTTDTSTST |
| | | AYMELSSLRSEDTAVYFCARKFLTTVVVTDYAMDYWGQG |
| | | TTVTVSS |
| J644M2S1-43VH | 805 | EVQLVQSGAEVKKPGASVKVSCKASGYTFNNYGINWVRQ |
| | | APGQGLEWMGWINTYTGVPSYAQGFTGRVTMTTDTSTST |
| | | AYMELSSLRSEDTAVYFCARKFLTTVVVTDYAMDYWGQG |
| | | TTVTVSS |
| J644M2S1-44VH | 806 | EVQLVQSGAEVKKPGASVKVSCKASGYTFSNYGIAWVRQ |
| | | APGQGLEWMGWINTYTGVPTYAQGFTGRVTMTTDTSTST |
| | | AYMELSSLRSEDTAVYFCARKFLTTVVVTDYAMDYWGQG |
| | | TTVTVSS |
| J644M2S1-45VH | 807 | EVQLVQSGAEVKKPGASVKVSCKASGYTFNNYGINWVRQ |
| | | APGQGLEWMGWINTYTGVPHYAQGFTGRVTMTTDTSTST |
| | | AYMELSSLRSEDTAVYFCARKFLTTVVVTDYAMDYWGQG |
| | | TTVTVSS |
| J644M2S1-46VH | 808 | EVQLVQSGAEVKKPGASVKVSCKASGYTFTNYGIXWVRQ |
| | | APGQGLEWMGWINTYTGEPXYAQGFTGRVTMTTDTSTST |
| | | AYMELSSLRSEDTAVYFCARKFLTTVVVTDYAMDYWGQG |
| | | TTVTVSS |
| J644M2S1-47VH | 809 | EVQLVQSGAEVKKPGASVKVSCKASGYTFNNYGINWVRQ |
| | | APGQGLEWMGWINTYTGVPTYAQGLTGRVTMTTDTSTST |
| | | AYMELSSLRSEDTAVYFCARKFLTTVVVTDYAMDYWGQG |
| | | TTVTVSS |
| J644M2S1-48VH | 810 | EVQLVQSGAEVKKPGASVKVSCKASGYTFTNYGINWVRQ |
| | | APGQGLEWMGWINTYTGQPTYAQGFTGRVTMTTDTSTST |
| | | AYMELSSLRSEDTAVYFCARKFLTTVVVTDYAMDYWGQG |
| | | TTVTVSS |
| J644M2S1-4VH | 811 | EVQLVQSGAEVKKPGASVKVSCKASGYTFTDYGITWVRQ |
| | | APGQGLEWMGWINTYTGKPTYAQGFTGRVTMTTDTSTST |
| | | AYMELSSLRSEDTAVYFCARKFLTTVVVTDYAMDYWGQG |
| | | TTVTVSS |
| J644M2S1-50VH | 812 | EVQLVQSGAEVKKPGASVKVSCKASGYTFTNYGINWVRQ |
| | | APGQGLEWMGWINTYTGVPQYAQGFTGRVTMTTDTSTST |
| | | AYMELSSLRSEDTAVYFCARKFLTTVVVTDYAMDYWGQG |
| | | TTVTVSS |
| J644M2S1-51VH | 813 | EVQLVQSGAEVKKPGASVKVSCKASGYTFQNYGINWVRQ |
| | | APGQGLEWMGWINTYTGVPTYAQGLTGRVTMTTDTSTST |
| | | AYMELSSLRSEDTAVYFCARKFLTTVVVTDYAMDYWGQG |
| | | TTVTVSS |
| J644M2S1-53VH | 814 | EVQLVQSGAEVKKPGASVKVSCKASGYTFTQYGINWVRQ |
| | | APGQGLEWMGWINTYTGDPHYAQGFTGRVTMTTDTSTST |
| | | AYMELSSLRSEDTAVYFCARKFLTTVVVTDYAMDYWGQG |
| | | TTVTVSS |
| J644M2S1-54VH | 815 | EVQLVQSGAEVKKPGASVKVSCKASGYTFSNYGINWVRQ |
| | | APGQGLEWMGWINTYTGLPTYAQGFTGRVTMTTDTSTST |
| | | AYMELSSLRSEDTAVYFCARKFLTTVVVTDYAMDYWGQG |
| | | TTVTVSS |
| J644M2S1-55VH | 816 | EVQLVQSGAEVKKPGASVKVSCKASGYTFTNYGMNWVRQ |
| | | APGQGLEWMGWINTYNGKPMYAQGFTGRVTMTTDTSTST |
| | | AYMELSSLRSEDTAVYFCARKFLTTVVVTDYAMDYWGQG |
| | | TTVTVSS |
| J644M2S1-56VH | 817 | EVQLVQSGAEVKKPGASVKVSCKASGYTFRNYGITWVRQ |
| | | APGQGLEWMGWINTYTGEPAYAQGLTGRVTMTTDTSTST |
| | | AYMELSSLRSEDTAVYFCARKFLTTVVVTDYAMDYWGQG |
| | | TTVTVSS |
| J644M2S1-59VH | 818 | EVQLVQSGAEVKKPGASVKVSCKASGYTFNHYGINWVRQ |
| | | APGQGLEWMGWINTYTGRPTYAQGFTGRVTMTTDTSTST |
| | | AYMELSSLRSEDTAVYFCARKFLTTVVVTDYAMDYWGQG |
| | | TTVTVSS |
| J644M2S1-5VH | 819 | EVQLVQSGAEVKKPGASVKVSCKASGYTFSNYGINWVRQ |
| | | APGQGLEWMGWINTYTGKPTYAQGLTGRVTMTTDTSTST |
| | | AYMELSSLRSEDTAVYFCARKFLTTVVVTDYAMDYWGQG |
| | | TTVTVSS |
| J644M2S1-60VH | 820 | EVQLVQSGAEVKKPGASVKVSCKASGYTFNNYGINWVRQ |
| | | APGQGLEWMGWINTYTGKPTYAQGFTGRVTMTTDTSTST |
| | | AYMELSSLRSEDTAVYFCARKFLTTVVVTDYAMDYWGQG |
| | | TTVTVSS |
| J644M2S1-64VH | 821 | EVQLVQSGAEVKKPGASVKVSCKASGYTFDNYGINWVRQ |
| | | APGQGLEWMGWINTYTGVPTYAQGFTGRVTMTTDTSTST |
| | | AYMELSSLRSEDTAVYFCARKFLTTVVVTDYAMDYWGQG |
| | | TTVTVSS |
| J644M2S1-65VH | 822 | EVQLVQSGAEVKKPGASVKVSCKASGYTFNDYGIIWVRQ |
| | | APGQGLEWMGWINTYTGKPSYAQGFTGRVTMTTDTSTST |
| | | AYMELSSLRSEDTAVYFCARKFLTTVVVTDYAMDYWGQG |
| | | TTVTVSS |
| J644M2S1-66VH | 823 | EVQLVQSGAEVKKPGASVKVSCKASGYTFSNYGINWVRQ |
| | | APGQGLEWMGWINTYTGKPTYAQGFTGRVTMTTDTSTST |
| | | AYMELSSLRSEDTAVYFCARKFLTTVVVTDYAMDYWGQG |
| | | TTVTVSS |
| J644M2S1-67VH | 824 | EVQLVQSGAEVKKPGASVKVSCKASGYTFANYGMNWVRQ |
| | | APGQGLEWMGWINTYTGKPTYAQGFTGRVTMTTDTSTST |
| | | AYMELSSLRSEDTAVYFCARKFLTTVVVTDYAMDYWGQG |
| | | TTVTVSS |
| J644M2S1-68VH | 825 | EVQLVQSGAEVKKPGASVKVSCKASGYTFNNYGINWVRQ |
| | | APGQGLEWMGWINTYTGEPSYAQGLTGRVTMTTDTSTST |
| | | AYMELSSLRSEDTAVYFCARKFLTTVVVTDYAMDYWGQG |
| | | TTVTVSS |
| J644M2S1-6VH | 826 | EVQLVQSGAEVKKPGASVKVSCKASGYTFTNYGINWVRQ |
| | | APGQGLEWMGWINTYTGVPTYAQGLTGRVTMTTDTSTST |
| | | AYMELSSLRSEDTAVYFCARKFLTTVVVTDYAMDYWGQG |
| | | TTVTVSS |
| J644M2S1-71VH | 827 | EVQLVQSGAEVKKPGASVKVSCKASGYTFDHYGMNWVRQ |
| | | APGQGLEWMGWINTYTGKPTYAQGLTGRVTMTTDTSTST |
| | | AYMELSSLRSEDTAVYFCARKFLTTVVVTDYAMDYWGQG |
| | | TTVTVSS |
| J644M2S1-72VH | 828 | EVQLVQSGAEVKKPGASVKVSCKASGYTFTNYGIGWVRQ |
| | | APGQGLEWMGWINTYTGKPSYAQGLTGRVTMTTDTSTST |
| | | AYMELSSLRSEDTAVYFCARKFLTTVVVTDYAMDYWGQG |
| | | TTVTVSS |
| J644M2S1-73VH | 829 | EVQLVQSGAEVKKPGASVKVSCKASGYTFTNYGMNWVRQ |
| | | APGQGLEWMGWINTYTGEPTYADDFKGRFTFTLDTSTST |
| | | AYMELSSLRSEDTAVYFCARKFLTTVVVTDYAMDYWGQG |
| | | TTVTVSS |
| J644M2S1-74VH | 830 | EVQLVQSGAEVKKPGASVKVSCKASGYTFNNYGMNWVRQ |
| | | APGQGLEWMGWINTYTGKPTYAQGLTGRVTMTTDTSTST |
| | | AYMELSSLRSEDTAVYFCARKFLTTVVVTDYAMDYWGQG |
| | | TTVTVSS |
| J644M2S1-75VH | 831 | EVQLVQSGAEVKKPGASVKVSCKASGYTFDNYGMNWVRQ |
| | | APGQGLEWMGWINTYTGVPTYAQGFTGRVTMTTDTSTST |
| | | AYMELSSLRSEDTAVYFCARKFLTTVVVTDYAMDYWGQG |
| | | TTVTVSS |
| J644M2S1-76VH | 832 | EVQLVQSGAEVKKPGASVKVSCKASGYTFNSYGINWVRQ |
| | | APGQGLEWMGWINTYTGKPTYAQGFTGRVTMTTDTSTST |
| | | AYMELSSLRSEDTAVYFCARKFLTTVVVTDYAMDYWGQG |
| | | TTVTVSS |
| J644M2S1-77VH | 833 | EVQLVQSGAEVKKPGASVKVSCKASGYTFSNYGITWVRQ |
| | | APGQGLEWMGWINTYTGKPTYAQGFTGRVTMTTDTSTST |
| | | AYMELSSLRSEDTAVYFCARKFLTTVVVTDYAMDYWGQG |
| | | TTVTVSS |
| J644M2S1-79VH | 834 | EVQLVQSGAEVKKPGASVKVSCKASGYTFTNYGINWVRQ |
| | | APGQGLEWMGWINTYNGQPTYAQGFTGRVTMTTDTSTST |
| | | AYMELSSLRSEDTAVYFCARKFLTTVVVTDYAMDYWGQG |
| | | TTVTVSS |
| J644M2S1-7VH | 835 | EVQLVQSGAEVKKPGASVKVSCKASGYTFTNYGIIWVRQ |
| | | APGQGLEWMGWINTYTGEPTYAQGFTGRVTMTTDTSTST |
| | | AYMELSSLRSEDTAVYFCARKFLTTVVVTDYAMDYWGQG |
| | | TTVTVSS |
| J644M2S1-81VH | 836 | EVQLVQSGAEVKKPGASVKVSCKASGYTFANYGINWVRQ |
| | | APGQGLEWMGWINTYTGKPTYAQGFTGRVTMTTDTSTST |
| | | AYMELSSLRSEDTAVYFCARKFLTTVVVTDYAMDYWGQG |
| | | TTVTVSS |
| J644M2S1-82VH | 837 | EVQLVQSGAEVKKPGASVKVSCKASGYTFSDYGIQWVRQ |
| | | APGQGLEWMGWINTYTGRPTYAQGFTGRVTMTTDTSTST |
| | | AYMELSSLRSEDTAVYFCARKFLTTVVVTDYAMDYWGQG |
| | | TTVTVSS |
| J644M2S1-83VH | 838 | EVQLVQSGAEVKKPGASVKVSCKASGYTFSNYGISWVRQ |
| | | APGQGLEWMGWINTYTGKPTYAQGFTGRVTMTTDTSTST |
| | | AYMELSSLRSEDTAVYFCARKFLTTVVVTDYAMDYWGQG |
| | | TTVTVSS |
| J644M2S1-84VH | 839 | EVQLVQSGAEVKKPGASVKVSCKASGYTFTNYGIQWVRQ |
| | | APGQGLEWMGWINTYTGVPTYAQGFTGRVTMTTDTSTST |
| | | AYMELSSLRSEDTAVYFCARKFLTTVVVTDYAMDYWGQG |
| | | TTVTVSS |
| J644M2S1-85VH | 840 | EVQLVQSGAEVKKPGASVKVSCKASGYTFTNYGINWVRQ |
| | | APGQGLEWMGWINTYTGVPTYAQGFTGRVTMTTDTSTST |
| | | AYMELSSLRSEDTAVYFCARKFLTTVVVTDYAMDYWGQG |
| | | TTVTVSS |
| J644M2S1-87VH | 841 | EVQLVQSGAEVKKPGASVKVSCKASGYTFTNYGINWVRQ |
| | | APGQGLEWMGWINTYSGKPTYAQGFTGRVTMTTDTSTST |
| | | AYMELSSLRSEDTAVYFCARKFLTTVVVTDYAMDYWGQG |
| | | TTVTVSS |
| J644M2S1-88VH | 842 | EVQLVQSGAEVKKPGASVKVSCKASGYTFSNYGINWVRQ |
| | | APGQGLEWMGWINTYTGQPTYAQGFTGRVTMTTDTSTST |
| | | AYMELSSLRSEDTAVYFCARKFLTTVVVTDYAMDYWGQG |
| | | TTVTVSS |
| J644M2S1-8VH | 843 | EVQLVQSGAEVKKPGASVKVSCKASGYTFPNYGINWVRQ |
| | | APGQGLEWMGWINTYTGKPTYAQGFTGRVTMTTDTSTST |
| | | AYMELSSLRSEDTAVYFCARKFLTTVVVTDYAMDYWGQG |
| | | TTVTVSS |
| J644M2S1-90VH | 844 | EVQLVQSGAEVKKPGASVKVSCKASGYTFTNYGINWVRQ |
| | | APGQGLEWMGWINTYTGKTNYAQGFTGRVTMTTDTSTST |
| | | AYMELSSLRSEDTAVYFCARKFLTTVVVTDYAMDYWGQG |
| | | TTVTVSS |
| J644M2S1-91VH | 845 | EVQLVQSGAEVKKPGASVKVSCKASGYTFNNYGINWVRQ |
| | | APGQGLEWMGWINTYTGEPNYAQGFTGRVTMTTDTSTST |
| | | AYMELSSLRSEDTAVYFCARKFLTTVVVTDYAMDYWGQG |
| | | TTVTVSS |
| J644M2S1-92VH | 846 | EVQLVQSGAEVKKPGASVKVSCKASGYTFSNYGITWVRQ |
| | | APGQGLEWMGWINTYTGEPHYAQGLTGRVTMTTDTSTST |
| | | AYMELSSLRSEDTAVYFCARKFLTTVVVTDYAMDYWGQG |
| | | TTVTVSS |
| J644M2S1-93VH | 847 | EVQLVQSGAEVKKPGASVKVSCKASGYTFKNYGINWVRQ |
| | | APGQGLEWMGWINTYTGQPTYAQGFTGRVTMTTDTSTST |
| | | AYMELSSLRSEDTAVYFCARKFLTTVVVTDYAMDYWGQG |
| | | TTVTVSS |
| J644M2S1-94VH | 848 | EVQLVQSGAEVKKPGASVKVSCKASGYTFNNYGINWVRQ |
| | | APGQGLEWMGWINTYTGIPTYAQGFTGRVTMTTDTSTST |
| | | AYMELSSLRSEDTAVYFCARKFLTTVVVTDYAMDYWGQG |
| | | TTVTVSS |
| J644M2S1-95VH | 849 | EVQLVQSGAEVKKPGASVKVSCKASGYTFTDYGINWVRQ |
| | | APGQGLEWMGWINTYTGKPTYAQGFTGRVTMTTDTSTST |
| | | AYMELSSLRSEDTAVYFCARKFLTTVVVTDYAMDYWGQG |
| | | TTVTVSS |
| J644M2S1-96VH | 850 | EVQLVQSGAEVKKPGASVKVSCKASGYTFSNYGINWVRQ |
| | | APGQGLEWMGWINTYSGVPTYAQGFTGRVTMTTDTSTST |
| | | AYMELSSLRSEDTAVYFCARKFLTTVVVTDYAMDYWGQG |
| | | TTVTVSS |
| J644M2S1-9VH | 851 | EVQLVQSGAEVKKPGASVKVSCKASGYTFTDYGINWVRQ |
| | | APGQGLEWMGWINTYTGKPTYAQGFTGRVTMTTDTSTST |
| | | AYMELSSLRSEDTAVYFCARKFLTTVVVTDYAMDYWGQG |
| | | TTVTVSS |
| J647M2-11VH | 852 | EVQLVQSGAEVKKPGASVKVSCKASGYTFTNYGMNWVRQ |
| | | APGQGLEWMGWINTYTGEPTYADDFKGRFTFTLDTSTST |
| | | AYMELSSLRSEDTAVYYCARKFWRTVVGTDNAMDYWGQG |
| | | TTVTVSS |
| J647M2-12VH | 853 | EVQLVQSGAEVKKPGASVKVSCKASGYTFTNYGMNWVRQ |
| | | APGQGLEWMGWINTYTGEPTYADDFKGRFTFTLDTSTST |
| | | AYMELSSLRSEDTAVYFCARKYSTTVVVTDYAMDYWGQG |
| | | TTVTVSS |
| J647M2-13VH | 854 | EVQLVQSGAEVKKPGASVKVSCKASGYTFTNYGMNWVRQ |
| | | APGQGLEWMGWINTYTGEPTYADDFKGRFTFTLDTSTST |
| | | AYMELSSLRSEDTAVYFCARKFLTTVVVTDSAMDYWGQG |
| | | TTVTVSS |
| J647M2-15VH | 855 | EVQLVQSGAEVKKPGASVKVSCKASGYTFTNYGMNWVRQ |
| | | APGQGLEWMGWINTYTGEPTYADDFKGRFTFTLDTSTST |
| | | AYMELSSLRSEDTAVYFCARKFMTTMAVTDFAMDYWGQG |
| | | TTVTVSS |
| J647M2-16VH | 856 | EVQLVQSGAEVKKPGASVKVSCKASGYTFTNYGMNWVRQ |
| | | APGQGLEWMGWINTYTGEPTYADDFKGRFTFTLDTSTST |
| | | AYMELSSLRSEDTAVYYCARKLLTTVVATDNAMDYWGQG |
| | | TTVTVSS |
| J647M2-17VH | 857 | EVQLVQSGAEVKKPGASVKVSCKASGYTFTNYGMNWVRQ |
| | | APGQGLEWMGWINTYTGEPTYADDFKGRFTFTLDTSTST |
| | | AYMELSSLRSEDTAVYYCARKFLTTVIVTDNAMDYWGQG |
| | | TTVTVSS |
| J647M2-19VH | 858 | EVQLVQSGAEVKKPGASVKVSCKASGYTFTNYGMNWVRQ |
| | | APGQGLEWMGWINTYTGEPTYADDFKGRFTFTLDTSTST |
| | | AYMELSSLRSEDTAVYFCARKFFTPVVVTDNAMDYWGQG |
| | | TTVTVSS |
| J647M2-1VH | 859 | EVQLVQSGAEVKKPGASVKVSCKASGYTFTNYGMNWVRQ |
| | | APGQGLEWMGWINTYTGEPTYADDFKGRFTFTLDTSTST |
| | | AYMELSSLRSEDTAVYYCARKLMTTVVVTDHAMDYWGQG |
| | | TTVTVSS |
| J647M2-20VH | 860 | EVQLVQSGAEVKKPGASVKVSCKASGYTFTNYGMNWVRQ |
| | | APGQGLEWMGWINTYTGEPTYADDFKGRFTFTLDTSTST |
| | | AYMELSSLRSEDTAVYYCARKYLTTVVVTDSAMDYWGQG |
| | | TTVTVSS |
| J647M2-21VH | 861 | EVQLVQSGAEVKKPGASVKVSCKASGYTFTNYGMNWVRQ |
| | | APGQGLEWMGWINTYTGEPTYADDFKGRFTFTLDTSTST |
| | | AYMELSSLRSEDTAVYYCARKFRSSVAVTDNAMDYWGQG |
| | | TTVTVSS |
| J647M2-22VH | 862 | EVQLVQSGAEVKKPGASVKVSCKASGYTFTNYGMNWVRQ |
| | | APGQGLEWMGWINTYTGEPTYADDFKGRFTFTLDTSTST |
| | | AYMELSSLRSEDTAVYYCARKLFTTVVVTDSAMDYWGQG |
| | | TTVTVSS |
| J647M2-23VH | 863 | EVQLVQSGAEVKKPGASVKVSCKASGYTFTNYGMNWVRQ |
| | | APGQGLEWMGWINTYTGEPTYADDFKGRFTFTLDTSTST |
| | | AYMELSSLRSEDTAVYFCARKYLMPVVVTDYAMDYWGQG |
| | | TTVTVSS |
| J647M2-24VH | 864 | EVQLVQSGAEVKKPGASVKVSCKASGYTFTNYGMNWVRQ |
| | | APGQGLEWMGWINTYTGEPTYADDFKGRFTFTLDTSTST |
| | | AYMELSSLRSEDTAVYFCARKLLDAVMVTDYAMDYWGQG |
| | | TTVTVSS |
| J647M2-26VH | 865 | EVQLVQSGAEVKKPGASVKVSCKASGYTFTNYGMNWVRQ |
| | | APGQGLEWMGWINTYTGEPTYADDFKGRFTFTLDTSTST |
| | | AYMELSSLRSEDTAVYYCARKFLTTVVVNDYAMDYWGQG |
| | | TTVTVSS |
| J647M2-44VH | 866 | EVQLVQSGAEVKKPGASVKVSCKASGYTFTNYGMNWVRQ |
| | | APGQGLEWMGWINTYTGEPTYADDFKGRFTFTLDTSTST |
| | | AYMELSSLRSEDTAVYYCARKLLTTVAVTDYAMDYWGQG |
| | | TTVTVSS |
| J647M2-45VH | 867 | EVQLVQSGAEVKKPGASVKVSCKASGYTFTNYGMNWVRQ |
| | | APGQGLEWMGWINTYTGEPTYADDFKGRFTFTLDTSTST |
| | | AYMELSSLRSEDTAVYFCARKFLKTVVATDDAMDYWGQG |
| | | TTVTVSS |
| J647M2-47VH | 868 | EVQLVQSGAEVKKPGASVKVSCKASGYTFTNYGMNWVRQ |
| | | APGQGLEWMGWINTYTGEPTYADDFKGRFTFTLDTSTST |
| | | AYMELSSLRSEDTAVYYCARKFLNTAVVTDYAMDYWGQG |
| | | TTVTVSS |
| J647M2-48VH | 869 | EVQLVQSGAEVKKPGASVKVSCKASGYTFTNYGMNWVRQ |
| | | APGQGLEWMGWINTYTGEPTYADDFKGRFTFTLDTSTST |
| | | AYMELSSLRSEDTAVYYCARRFLTTVDVTDNAMDYWGQG |
| | | TTVTVSS |
| J647M2-4VH | 870 | EVQLVQSGAEVKKPGASVKVSCKASGYTFTNYGMNWVRQ |
| | | APGQGLEWMGWINTYTGEPTYADDFKGRFTFTLDTSTST |
| | | AYMELSSLRSEDTAVYFCARKYLTPVVATDFAMDYWGQG |
| | | TTVTVSS |
| J647M2-51VH | 871 | EVQLVQSGAEVKKPGASVKVSCKASGYTFTNYGMNWVRQ |
| | | APGQGLEWMGWINTYTGEPTYADDFKGRFTFTLDTSTST |
| | | AYMELSSLRSEDTAVYFCARKCMTTIVETDNAMDYWGQG |
| | | TTVTVSS |
| J647M2-52VH | 872 | EVQLVQSGAEVKKPGASVKVSCKASGYTFTNYGMNWVRQ |
| | | APGQGLEWMGWINTYTGEPTYADDFKGRFTFTLDTSTST |
| | | AYMELSSLRSEDTAVYYCARKFMNTVDVTDNAMDYWGQG |
| | | TTVTVSS |
| J647M2-53VH | 873 | EVQLVQSGAEVKKPGASVKVSCKASGYTFTNYGMNWVRQ |
| | | APGQGLEWMGWINTYTGEPTYADDFKGRFTFTLDTSTST |
| | | AYMELSSLRSEDTAVYYCARKLFTTVVVTDDAMDYWGQG |
| | | TTVTVSS |
| J647M2-54VH | 874 | EVQLVQSGAEVKKPGASVKVSCKASGYTFTNYGMNWVRQ |
| | | APGQGLEWMGWINTYTGEPTYADDFKGRFTFTLDTSTST |
| | | AYMELSSLRSEDTAVYYCARKLMTTVVVTDYAMDYWGQG |
| | | TTVTVSS |
| J647M2-55VH | 875 | EVQLVQSGAEVKKPGASVKVSCKASGYTFTNYGMNWVRQ |
| | | APGQGLEWMGWINTYTGEPTYADDFKGRFTFTLDTSTST |
| | | AYMELSSLRSEDTAVYYCARKFLPTVVVTDYAMDYWGQG |
| | | TTVTVSS |
| J647M2-56VH | 876 | EVQLVQSGAEVKKPGASVKVSCKASGYTFTNYGMNWVRQ |
| | | APGQGLEWMGWINTYTGEPTYADDFKGRFTFTLDTSTST |
| | | AYMELSSLRSEDTAVYFCARKLLTTVVVTDNAMDYWGQG |
| | | TTVTVSS |
| J647M2-58VH | 877 | EVQLVQSGAEVKKPGASVKVSCKASGYTFTNYGMNWVRQ |
| | | APGQGLEWMGWINTYTGEPTYADDFKGRFTFTLDTSTST |
| | | AYMELSSLRSEDTAVYYCARKILTTVVVTDNAMDYWGQG |
| | | TTVTVSS |
| J647M2-70VH | 878 | EVQLVQSGAEVKKPGASVKVSCKASGYTFTNYGMNWVRQ |
| | | APGQGLEWMGWINTYTGEPTYADDFKGRFTFTLDTSTST |
| | | AYMELSSLRSEDTAVYYCARKVMATEVVTDYAMDYWGQG |
| | | TTVTVSS |
| J647M2-71VH | 879 | EVQLVQSGAEVKKPGASVKVSCKASGYTFTNYGMNWVRQ |
| | | APGQGLEWMGWINTYTGEPTYADDFKGRFTFTLDTSTST |
| | | AYMELSSLRSEDTAVYYCARKLVTTVVVTDYAMDYWGQG |
| | | TTVTVSS |
| J647M2-72VH | 880 | EVQLVQSGAEVKKPGASVKVSCKASGYTFTNYGMNWVRQ |
| | | APGQGLEWMGWINTYTGEPTYADDFKGRFTFTLDTSTST |
| | | AYMELSSLRSEDTAVYFCARKFRKPVSVTDYAMDYWGQG |
| | | TTVTVSS |
| J647M2-73VH | 881 | EVQLVQSGAEVKKPGASVKVSCKASGYTFTNYGMNWVRQ |
| | | APGQGLEWMGWINTYTGEPTYADDFKGRFTFTLDTSTST |
| | | AYMELSSLRSEDTAVYYCARKLWTTVVVTDNAMDYWGQG |
| | | TTVTVSS |
| J647M2-74VH | 882 | EVQLVQSGAEVKKPGASVKVSCKASGYTFTNYGMNWVRQ |
| | | APGQGLEWMGWINTYTGEPTYADDFKGRFTFTLDTSTST |
| | | AYMELSSLRSEDTAVYYCARKLLTPVVVTDYAMDYWGQG |
| | | TTVTVSS |
| J647M2-75VH | 883 | EVQLVQSGAEVKKPGASVKVSCKASGYTFTNYGMNWVRQ |
| | | APGQGLEWMGWINTYTGEPTYADDFKGRFTFTLDTSTST |
| | | AYMELSSLRSEDTAVYYCARKFRTTVVETDYCMDYWGQG |
| | | TTVTVSS |
| J647M2-76VH | 884 | EVQLVQSGAEVKKPGASVKVSCKASGYTFTNYGMNWVRQ |
| | | APGQGLEWMGWINTYTGEPTYADDFKGRFTFTLDTSTST |
| | | AYMELSSLRSEDTAVYFCARKYFTTVAVTDYAMDYWGQG |
| | | TTVTVSS |
| J647M2-78VH | 885 | EVQLVQSGAEVKKPGASVKVSCKASGYTFTNYGMNWVRQ |
| | | APGQGLEWMGWINTYTGEPTYADDFKGRFTFTLDTSTST |
| | | AYMELSSLRSEDTAVYYCARRFLTTVEVTDLAMDYWGQG |
| | | TTVTVSS |
| J647M2-79VH | 886 | EVQLVQSGAEVKKPGASVKVSCKASGYTFTNYGMNWVRQ |
| | | APGQGLEWMGWINTYTGEPTYADDFKGRFTFTLDTSTST |
| | | AYMELSSLRSEDTAVYYCARKFLRTEVMTDYAMDYWGQG |
| | | TTVTVSS |
| J647M2-7VH | 887 | EVQLVQSGAEVKKPGASVKVSCKASGYTFTNYGMNWVRQ |
| | | APGQGLEWMGWINTYTGEPTYADDFKGRFTFTLDTSTST |
| | | AYMELSSLRSEDTAVYFCARKFLSTVAVTDSAMDYWGQG |
| | | TTVTVSS |
| J647M2-80VH | 888 | EVQLVQSGAEVKKPGASVKVSCKASGYTFTNYGMNWVRQ |
| | | APGQGLEWMGWINTYTGEPTYADDFKGRFTFTLDTSTST |
| | | AYMELSSLRSEDTAVYYCARKVLNTVVVTDYAMDYWGQG |
| | | TTVTVSS |
| J647M2-83VH | 889 | EVQLVQSGAEVKKPGASVKVSCKASGYTFTNYGMNWVRQ |
| | | APGQGLEWMGWINTYTGEPTYADDFKGRFTFTLDTSTST |
| | | AYMELSSLRSEDTAVYFCARKFMNTAMVTDYAMDYWGQG |
| | | TTVTVSS |
| J647M2-84VH | 890 | EVQLVQSGAEVKKPGASVKVSCKASGYTFTNYGMNWVRQ |
| | | APGQGLEWMGWINTYTGEPTYADDFKGRFTFTLDTSTST |
| | | AYMELSSLRSEDTAVYYCARKFSTTVVVTDYAMDYWGQG |
| | | TTVTVSS |
| J647M2-85VH | 891 | EVQLVQSGAEVKKPGASVKVSCKASGYTFTNYGMNWVRQ |
| | | APGQGLEWMGWINTYTGEPTYADDFKGRFTFTLDTSTST |
| | | AYMELSSLRSEDTAVYFCARKYFTTVVVTDYAMDYWGQG |
| | | TTVTVSS |
| J647M2-86VH | 892 | EVQLVQSGAEVKKPGASVKVSCKASGYTFTNYGMNWVRQ |
| | | APGQGLEWMGWINTYTGEPTYADDFKGRFTFTLDTSTST |
| | | AYMELSSLRSEDTAVYFCARKFLNTVVVTDYAMDYWGQG |
| | | TTVTVSS |
| J647M2S1-12VH | 893 | EVQLVQSGAEVKKPGASVKVSCKASGYTFTNYGMNWVRQ |
| | | APGQGLEWMGWINTYTGEPTYADDFKGRFTFTLDTSTST |
| | | AYMELSSLRSEDTAVYYCARKFMPTVVETDYAMDYWGQG |
| | | TTVTVSS |
| J647M2S1-13VH | 894 | EVQLVQSGAEVKKPGASVKVSCKASGYTFTNYGINWVRQ |
| | | APGQGLEWMGWINTYTGNPTYAQGFTGRVTMTTDTSTST |
| | | AYMELSSLRSEDTAVYFCARKFLTTVVVTDYAMDYWGQG |
| | | TTVTVSS |
| J647M2S1-14VH | 895 | EVQLVQSGAEVKKPGASVKVSCKASGYTFADYGMNWVRQ |
| | | APGQGLEWMGWINTYTGEPTYAQGFTGRVTMTTDTSTST |
| | | AYMELSSLRSEDTAVYFCARKFLTTVVVTDYAMDYWGQG |
| | | TTVTVSS |
| J647M2S1-15VH | 896 | EVQLVQSGAEVKKPGASVKVSCKASGYTFTNYGMNWVRQ |
| | | APGQGLEWMGWINTYTGEPTYADDFKGRFTFTLDTSTST |
| | | AYMELSSLRSEDTAVYYCARKFLTTVVVTDCAMDYWGQG |
| | | TTVTVSS |
| J647M2S1-17VH | 897 | EVQLVQSGAEVKKPGASVKVSCKASGYTFTNYGMNWVRQ |
| | | APGQGLEWMGWINTYTGEPTYAQGFTGRVTMTTDTSTST |
| | | AYMELSSLRSEDTAVYFCARKFLTTVVVTDYAMDYWGQG |
| | | TTVTVSS |
| J647M2S1-18VH | 898 | EVQLVQSGAEVKKPGASVKVSCKASGYTFTNYGMNWVRQ |
| | | APGQGLEWMGWINTYTGEPTYADDFKGRFTFTLDTSTST |
| | | AYMELSSLRSEDTAVYYCARKFLTTVVVTDNAMDYWGQG |
| | | TTVTVSS |
| J647M2S1-19VH | 899 | EVQLVQSGAEVKKPGASVKVSCKASGYTFTNYGMNWVRQ |
| | | APGQGLEWMGWINTYTGEPTYADDFKGRFTFTLDTSTST |
| | | AYMELSSLRSEDTAVYYCARKLLNTVVGTDYAMDYWGQG |
| | | TTVTVSS |
| J647M2S1-21VH | 900 | EVQLVQSGAEVKKPGASVKVSCKASGYTFTNYGMNWVRQ |
| | | APGQGLEWMGWINTYTGEPTYADDFKGRFTFTLDTSTST |
| | | AYMELSSLRSEDTAVYFCARKLLTTEAVTDYAMDYWGQG |
| | | TTVTVSS |
| J647M2S1-22VH | 901 | EVQLVQSGAEVKKPGASVKVSCKASGYTFTNYGMNWVRQ |
| | | APGQGLEWMGWINTYTGEPTYADDFKGRFTFTLDTSTST |
| | | AYMELSSLRSEDTAVYFCARKYSTPVVVTDYAMDYWGQG |
| | | TTVTVSS |
| J647M2S1-23VH | 902 | EVQLVQSGAEVKKPGASVKVSCKASGYTFTNYGINWVRQ |
| | | APGQGLEWMGWINTYTGEPTYAQGLTGRVTMTTDTSTST |
| | | AYMELSSLRSEDTAVYFCARKFLTTVVVTDYAMDYWGQG |
| | | TTVTVSS |
| J647M2S1-26VH | 903 | EVQLVQSGAEVKKPGASVKVSCKASGYTFTNYGMNWVRQ |
| | | APGQGLEWMGWINTYTGEPTYADDFKGRFTFTLDTSTST |
| | | AYMELSSLRSEDTAVYFCARKCLNTVAVTEHRMDYWGQG |
| | | TTVTVSS |
| J647M2S1-28VH | 904 | EVQLVQSGAEVKKPGASVKVSCKASGYTFTNYGMNWVRQ |
| | | APGQGLEWMGWINTYTGEPTYADDFKGRFTFTLDTSTST |
| | | AYMELSSLRSEDTAVYYCARKFLTTVVHTDYAMDYWGQG |
| | | TTVTVSS |
| J647M2S1-30VH | 905 | EVQLVQSGAEVKKPGASVKVSCKASGYTFTNYGMNWVRQ |
| | | APGQGLEWMGWINTYTGQPTYAQGFTGRVTMTTDTSTST |
| | | AYMELSSLRSEDTAVYFCARKFLTTVVVTDYAMDYWGQG |
| | | TTVTVSS |
| J647M2S1-31VH | 906 | EVQLVQSGAEVKKPGASVKVSCKASGYTFTNYGINWVRQ |
| | | APGQGLEWMGWINTYTGKPTYAQGFTGRVTMTTDTSTST |
| | | AYMELSSLRSEDTAVYFCARKFLTTVVVTDYAMDYWGQG |
| | | TTVTVSS |
| J647M2S1-32VH | 907 | EVQLVQSGAEVKKPGASVKVSCKASGYTFANYGINWVRQ |
| | | APGQGLEWMGWINTYTGEPTYAQGFTGRVTMTTDTSTST |
| | | AYMELSSLRSEDTAVYFCARKFLTTVVVTDYAMDYWGQG |
| | | TTVTVSS |
| J647M2S1-33VH | 908 | EVQLVQSGAEVKKPGASVKVSCKASGYTFTNYGMNWVRQ |
| | | APGQGLEWMGWINTYTGEPTYADDFKGRFTFTLDTSTST |
| | | AYMELSSLRSEDTAVYYCARKFRTTVVLTDSAMDYWGQG |
| | | TTVTVSS |
| J647M2S1-35VH | 909 | EVQLVQSGAEVKKPGASVKVSCKASGYTFSNYGINWVRQ |
| | | APGQGLEWMGWINTYTGEPTYAQGLTGRVTMTTDTSTST |
| | | AYMELSSLRSEDTAVYFCARKFLTTVVVTDYAMDYWGQG |
| | | TTVTVSS |
| J647M2S1-36VH | 910 | EVQLVQSGAEVKKPGASVKVSCKASGYTFTNYGMNWVRQ |
| | | APGQGLEWMGWINTYTGEPTYADDFKGRFTFTLDTSTST |
| | | AYMELSSLRSEDTAVYYCARKFQTPVVDTDYAMDYWGQG |
| | | TTVTVSS |
| J647M2S1-39VH | 911 | EVQLVQSGAEVKKPGASVKVSCKASGYTFTNYGMNWVRQ |
| | | APGQGLEWMGWINTYTGEPTYADDFKGRFTFTLDTSTST |
| | | AYMELSSLRSEDTAVYYCARKFMKTRVVTDNAMDYWGQG |
| | | TTVTVSS |
| J647M2S1-40VH | 912 | EVQLVQSGAEVKKPGASVKVSCKASGYTFSNYGIVWVRQ |
| | | APGQGLEWMGWINTYTGEPTYAQGFTGRVTMTTDTSTST |
| | | AYMELSSLRSEDTAVYFCARKFLTTVVVTDYAMDYWGQG |
| | | TTVTVSS |
| J647M2S1-41VH | 913 | EVQLVQSGAEVKKPGASVKVSCKASGYTFPNYGISWVRQ |
| | | APGQGLEWMGWINTYTGEPSYAQGFTGRVTMTTDTSTST |
| | | AYMELSSLRSEDTAVYFCARKFLTTVVVTDYAMDYWGQG |
| | | TTVTVSS |
| J647M2S1-43VH | 914 | EVQLVQSGAEVKKPGASVKVSCKASGYTFTNYGINWVRQ |
| | | APGQGLEWMGWINTYTGEPSYAQGLTGRVTMTTDTSTST |
| | | AYMELSSLRSEDTAVYFCARKFLTTVVVTDYAMDYWGQG |
| | | TTVTVSS |
| J647M2S1-45VH | 915 | EVQLVQSGAEVKKPGASVKVSCKASGYTFTKYGINWVRQ |
| | | APGQGLEWMGWINTYTGEPTYAQGFTGRVTMTTDTSTST |
| | | AYMELSSLRSEDTAVYFCARKFLTTVVVTDYAMDYWGQG |
| | | TTVTVSS |
| J647M2S1-47VH | 916 | EVQLVQSGAEVKKPGASVKVSCKASGYTFTNYGMNWVRQ |
| | | APGQGLEWMGWINTYTGEPTYADDFKGRFTFTLDTSTST |
| | | AYMELSSLRSEDTAVYYCARKYLTTVVATDYAMDYWGQG |
| | | TTVTVSS |
| J647M2S1-48VH | 917 | EVQLVQSGAEVKKPGASVKVSCKASGYTFTNYGMNWVRQ |
| | | APGQGLEWMGWINTYTGEPTYADDFKGRFTFTLDTSTST |
| | | AYMELSSLRSEDTAVYYCARKLLNTVVVTDYAMDYWGQG |
| | | TTVTVSS |
| J647M2S1-65VH | 918 | EVQLVQSGAEVKKPGASVKVSCKASGYTFTNYGMNWVRQ |
| | | APGQGLEWMGWINTYTGEPTYADDFKGRFTFTLDTSTST |
| | | AYMELSSLRSEDTAVYYCARKFLTPVVVTDCAMDYWGQG |
| | | TTVTVSS |
| J647M2S1-66VH | 919 | EVQLVQSGAEVKKPGASVKVSCKASGYTFTNYGINWVRQ |
| | | APGQGLEWMGWINTYTGEPRYAQGLTGRVTMTTDTSTST |
| | | AYMELSSLRSEDTAVYFCARKFLTTVVVTDYAMDYWGQG |
| | | TTVTVSS |
| J647M2S1-67VH | 920 | EVQLVQSGAEVKKPGASVKVSCKASGYTFRDYGINWVRQ |
| | | APGQGLEWMGWINTYTGLPTYAQGFTGRVTMTTDTSTST |
| | | AYMELSSLRSEDTAVYFCARKFLTTVVVTDYAMDYWGQG |
| | | TTVTVSS |
| J647M2S1-69VH | 921 | EVQLVQSGAEVKKPGASVKVSCKASGYTFTNYGMNWVRQ |
| | | APGQGLEWMGWINTYTGEPTYADDFKGRFTFTLDTSTST |
| | | AYMELSSLRSEDTAVYFCARKFWTTIVVTDYAMDYWGQG |
| | | TTVTVSS |
| J647M2S1-6VH | 922 | EVQLVQSGAEVKKPGASVKVSCKASGYTFTNYGMNWVRQ |
| | | APGQGLEWMGWINTYTGEPTYADDFKGRFTFTLDTSTST |
| | | AYMELSSLRSEDTAVYFCARKLLTTVSATDNAMDYWGQG |
| | | TTVTVSS |
| J647M2S1-70VH | 923 | EVQLVQSGAEVKKPGASVKVSCKASGYTFTNYGMNWVRQ |
| | | APGQGLEWMGWINTYTGEPTYADDFKGRFTFTLDTSTST |
| | | AYMELSSLRSEDTAVYYCARKFLNTVVVTDYAMDYWGQG |
| | | TTVTVSS |
| J647M2S1-72VH | 924 | EVQLVQSGAEVKKPGASVKVSCKASGYTFTDYGINWVRQ |
| | | APGQGLEWMGWINTYNGEPSYAQGLTGRVTMTTDTSTST |
| | | AYMELSSLRSEDTAVYFCARKFLTTVVVTDYAMDYWGQG |
| | | TTVTVSS |
| J647M2S1-75VH | 925 | EVQLVQSGAEVKKPGASVKVSCKASGYTFATYGIAWVRQ |
| | | APGQGLEWMGWINTYSGVPKYAQGLTGRVTMTTDTSTST |
| | | AYMELSSLRSEDTAVYFCARKFLTTVVVTDYAMDYWGQG |
| | | TTVTVSS |
| J647M2S1-76VH | 926 | EVQLVQSGAEVKKPGASVKVSCKASGYTFTNYGMNWVRQ |
| | | APGQGLEWMGWINTYTGEPTYADDFKGRFTFTLDTSTST |
| | | AYMELSSLRSEDTAVYFCARKFRTTAVPTDNAMDYWGQG |
| | | TTVTVSS |
| J647M2S1-77VH | 927 | EVQLVQSGAEVKKPGASVKVSCKASGYTFTNYGMNWVRQ |
| | | APGQGLEWMGWINTYTGEPTYADDFKGRFTFTLDTSTST |
| | | AYMELSSLRSEDTAVYYCARKFLTTVVNTDSAMDYWGQG |
| | | TTVTVSS |
| J647M2S1-78VH | 928 | EVQLVQSGAEVKKPGASVKVSCKASGYTFTNYGMNWVRQ |
| | | APGQGLEWMGWINTYTGEPTYADDFKGRFTFTLDTSTST |
| | | AYMELSSLRSEDTAVYFCARKFLTTVVVTDYAMDYWGRG |
| | | TTVTVSS |
| J647M2S1-79VH | 929 | EVQLVQSGAEVKKPGASVKVSCKASGYTFTNYGMNWVRQ |
| | | APGQGLEWMGWINTYTGEPTYADDFKGRFTFTLDTSTST |
| | | AYMELSSLRSEDTAVYYCARKLLKTRVVTDYAMDYWGQG |
| | | TTVTVSS |
| J647M2S1-7VH | 930 | EVQLVQSGAEVKKPGASVKVSCKASGYTFTNYGMNWVRQ |
| | | APGQGLEWMGWINTYTGEPTYADDFKGRFTFTLDTSTST |
| | | AYMELSSLRSEDTAVYFCARKFLTTVVVTDYAMDYWGQG |
| | | TTVTVSS |
| J647M2S1-80VH | 931 | EVQLVQSGAEVKKPGASVKVSCKASGYTFTNYGMNWVRQ |
| | | APGQGLEWMGWINTYTGEPTYADDFKGRFTFTLDTSTST |
| | | AYMELSSLRSEDTAVYYCARKLLTTVVATDYAMDYWGQG |
| | | TTVTVSS |
| J647M2S1-84VH | 932 | EVQLVQSGAEVKKPGASVKVSCKASGYTFTNYGINWVRQ |
| | | APGQGLEWMGWINTYTGEPTYAQGFTGRVTMTTDTSTST |
| | | AYMELSSLRSEDTAVYFCARKFLTTVVVTDYAMDYWGQG |
| | | TTVTVSS |
| J647M2S1-85VH | 933 | EVQLVQSGAEVKKPGASVKVSCKASGYTFTNYGINWVRQ |
| | | APGQGLEWMGWINTYTGQPTYAQGFTGRVTMTTDTSTST |
| | | AYMELSSLRSEDTAVYFCARKFLTTVVVTDYAMDYWGQG |
| | | TTVTVSS |
| J647M2S1-87VH | 934 | EVQLVQSGAEVKKPGASVKVSCKASGYTFTNYGMNWVRQ |
| | | APGQGLEWMGWINTYTGEPTYADDFKGRFTFTLDTSTST |
| | | AYMELSSLRSEDTAVYYCARKFFPTMVVTDYAMDYWGQG |
| | | TTVTVSS |
| J647M2S1-88VH | 935 | EVQLVQSGAEVKKPGASVKVSCKASGYTFTNYGMNWVRQ |
| | | APGQGLEWMGWINTYTGEPTYADDFKGRFTFTLDTSTST |
| | | AYMELSSLRSEDTAVYYCARKFVTTMVVTDYAMDYWGQG |
| | | TTVTVSS |
| J647M2S1-8VH | 936 | EVQLVQSGAEVKKPGASVKVSCKASGYTFTNYGMNWVRQ |
| | | APGQGLEWMGWINTYTGEPTYAQGLTGRVTMTTDTSTST |
| | | AYMELSSLRSEDTAVYFCARKFLTTVVVTDYAMDYWGQG |
| | | TTVTVSS |
| J647M2S1-92VH | 937 | EVQLVQSGAEVKKPGASVKVSCKASGYTFTNYGMNWVRQ |
| | | APGQGLEWMGWINTYTGEPTYADDFKGRFTFTLDTSTST |
| | | AYMELSSLRSEDTAVYFCARKLLTTIVATDNAMDYWGQG |
| | | TTVTVSS |
| J647M2S1-93VH | 938 | EVQLVQSGAEVKKPGASVKVSCKASGYTFTNYGMNWVRQ |
| | | APGQGLEWMGWINTYTGEPTYADDFKGRFTFTLDTSTST |
| | | AYMELSSLRSEDTAVYYCARKLMSTVVETDNAMDYWGQG |
| | | TTVTVSS |
| J647M2S1-94VH | 939 | EVQLVQSGAEVKKPGASVKVSCKASGYTFTNYGMNWVRQ |
| | | APGQGLEWMGWINTYTGEPTYADDFKGRFTFTLDTSTST |
| | | AYMELSSLRSEDTAVYYCARKLLFTVVQTDYAMDYWGQG |
| | | TTVTVSS |
| J647M2S1-96VH | 940 | EVQLVQSGAEVKKPGASVKVSCKASGYTFTNYGMNWVRQ |
| | | APGQGLEWMGWINTYTGEPTYADDFKGRFTFTLDTSTST |
| | | AYMELSSLRSEDTAVYYCARKLLNTVVDTDYAMDYWGQG |
| | | TTVTVSS |
| J662M2S3-14VH | 941 | EVQLVQSGAEVKKPGASVKVSCKASGYTFSNYGIIWVRQ |
| | | APGQGLEWMGWINTYTGEPHYAQKLQGRVTMTTDTSTST |
| | | AYMELSSLRSEDTAVYFCARKLFTVEDVTDCAMDYWGQG |
| | | TTVTVSS |
| J662M2S3-18VH | 942 | EVQLVQSGAEVKKPGASVKVSCKASGYTFDNYGMNWVRQ |
| | | APGQGLEWMGWINTYNGKPTYAQKFQGRVTMTTDTSTST |
| | | AYMELSSLRSEDTAVYFCARKLFLVEAVTDYAMDYWGQG |
| | | TTVTVSS |
| J662M2S3-28VH | 943 | EVQLVQSGAEVKKPGASVKVSCKASGYTFRNYGIIWVRQ |
| | | APGQGLEWMGWINTYTGKPTYAQKFQGRVTMTTDTSTST |
| | | AYMELSSLRSEDTAVYFCARKLFTTVDVTDNAMDYWGQG |
| | | TTVTVSS |
| J662M2S3-29VH | 944 | EVQLVQSGAEVKKPGASVKVSCKASGYTFNNYGIIWVRQ |
| | | APGQGLEWMGWINTYTGVPTYAQKFQGRVTMTTDTSTST |
| | | AYMELSSLRSEDTAVYYCARKLFNTVDVTDNAMDYWGQG |
| | | TTVTVSS |
| J662M2S3-30VH | 945 | EVQLVQSGAEVKKPGASVKVSCKASGYTFNNYGIIWVRQ |
| | | APGQGLEWMGWINTYTGEPHYAQKFQGRVTMTTDTSTST |
| | | AYMELSSLRSEDTAVYYCARKLFKTMAVTDAAMDYWGQG |
| | | TTVTVSS |
| J662M2S3-34VH | 946 | EVQLVQSGAEVKKPGASVKVSCKASGYTFNNYGINWVRQ |
| | | APGQGLEWMGWINTYTGKPTYAQKFQGRVTMTTDTSTST |
| | | AYMELSSLRSEDTAVYFCARKFRNTVAVTDYAMDYWGQG |
| | | TTVTVSS |
| J662M2S3-3VH | 947 | EVQLVQSGAEVKKPGASVKVSCKASGYTFNNYGIIWVRQ |
| | | APGQGLEWMGWINTYTGKPTYAQKFQGRVTMTTDTSTST |
| | | AYMELSSLRSEDTAVYYCARKLFNTVAVTDNAMDYWGQG |
| | | TTVTVSS |
| J662M2S3-41VH | 948 | EVQLVQSGAEVKKPGASVKVSCKASGYTFTNYGINWVRQ |
| | | APGQGLEWMGWINTYTGKPTYAQKFQGRVTMTTDTSTST |
| | | AYMELSSLRSEDTAVYYCARKLFFTEDVTDYAMDYWGQG |
| | | TTVTVSS |
| J662M2S3-45VH | 949 | EVQLVQSGAEVKKPGASVKVSCKASGYTFNNYGINWVRQ |
| | | APGQGLEWMGWINTYTGKPTYAQKFQGRVTMTTDTSTST |
| | | AYMELSSLRSEDTAVYFCARKFFTPVVVTDNAMDYWGQG |
| | | TTVTVSS |
| J662M2S3-55VH | 950 | EVQLVQSGAEVKKPGASVKVSCKASGYTFRNYGITWVRQ |
| | | APGQGLEWMGWINTYTGKPTYAQKFQGRVTMTTDTSTST |
| | | AYMELSSLRSEDTAVYFCARKLFTTMDVTDNAMDYWGQG |
| | | TTVTVSS |
| J662M2S3-5VH | 951 | EVQLVQSGAEVKKPGASVKVSCKASGYTFANYGIIWVRQ |
| | | APGQGLEWMGWINTYTGKPTYAQKFQGRVTMTTDTSTST |
| | | AYMELSSLRSEDTAVYYCARKLFTTMDVTDNAMDYWGQG |
| | | TTVTVSS |
| J662M2S3-65VH | 952 | EVQLVQSGAEVKKPGASVKVSCKASGYTFNNYGIIWVRQ |
| | | APGQGLEWMGWINTYTGKPTYAQKLQGRVTMTTDTSTST |
| | | AYMELSSLRSEDTAVYFCARKLFNTVDVTDNAMDYWGQG |
| | | TTVTVSS |
| J662M2S3-78VH | 953 | EVQLVQSGAEVKKPGASVKVSCKASGYTFSNYGIIWVRQ |
| | | APGQGLEWMGWINTYTGKPSYAQKFQGRVTMTTDTSTST |
| | | AYMELSSLRSEDTAVYYCARKLFNTVDVTDNAMDYWGQG |
| | | TTVTVSS |
| J662M2S3-84VH | 954 | EVQLVQSGAEVKKPGASVKVSCKASGYTFSNYGINWVRQ |
| | | APGQGLEWMGWINTYTGQPSYAQKFQGRVTMTTDTSTST |
| | | AYMELSSLRSEDTAVYYCARKLFKTEAVTDYAMDYWGQG |
| | | TTVTVSS |
| J662M2S3-87VH | 955 | EVQLVQSGAEVKKPGASVKVSCKASGYTFNNYGIIWVRQ |
| | | APGQGLEWMGWINTYSGKPTYAQKFQGRVTMTTDTSTST |
| | | AYMELSSLRSEDTAVYFCARKLFTTMDVTDNAMDYWGQG |
| | | TTVTVSS |
| J662M2S3-96VH | 956 | EVQLVQSGAEVKKPGASVKVSCKASGYTFNNYGIIWVRQ |
| | | APGQGLEWMGWINTYTGKPTYAQKFQGRVTMTTDTSTST |
| | | AYMELSSLRSEDTAVYYCARKFFTTMAVTDNAMDYWGQG |
| | | TTVTVSS |

[0136] Table 28 provides a list of amino acid sequences of VL regions of affinity matured fully human TNF antibodies derived from hMAK199 Amino acid residues of individual CDRs of each VL sequence are indicated in bold.

TABLE 28
List of amino acid sequences of affinity matured hMAK199
VL variants

| Clone | SEQ ID NO: | VL |
|---|---|---|
| J644M2S1-11Vk | 957 | DIQMTQSPSSLSASVGDRVTITCRASQDISNYLNWYQQK |
| | | PGKAPKLLIYYTSRLQSGVPSRFSGSGSGTDYTLTISSL |
| | | QPEDFATYYCQQGNTLPPTFGQGTKLEIK |
| J644M2S1-73Vk | 958 | DIQMTQSPSSLSASVGDRVTITCRASQDISNYLNWYQQK |
| | | PGKAPKLLIYYASRLQSGVPSRFSGSGSGTDYTLTISSL |
| | | QPEDFATYFCQQGNTLPPTFGQGTKLEIK |
| J647M2-11Vk | 959 | DIQMTQSPSSLSASVGDRVTITCRASQDISNYLNWYQQK |
| | | PGKTVKLLIYYTSRLQSGVPSRFSGSGSGTDYTLTISSL |
| | | QPEDFATYFCQQGNTLPPTFGQGTKLEIK |
| J647M2S1-10Vk | 960 | DIQMTQSPSSLSASVGDRVTITCRASQDIWNYLNWYQQK |
| | | PGKAPKLLIYYTSRLQSGVPSRFSGSGSGTDFTLTISSL |
| | | QPEDFATYFCQQGNRYPPTFGQGTKLEIK |
| J647M2S1-16Vk | 961 | DIQMTQSPSSLSASVGDRVTITCRASQDICTYLNWYQQK |
| | | PGKAPKLLIYYTSRLQSGVPSRFSGSGSGTDFTLTISSL |
| | | QPEDFATYYCQQGNSPPPTFGQGTKLEIK |
| J647M2S1-1Vk | 962 | DIQMTQSPSSLSASVGDRVTITCRASQAIGNYLNWYQQK |
| | | PGKAPKLLIYYASRLQSGVPSRFSGSGSGTDFTLTISSL |
| | | QPEDFATYFCQQGNTLPPTFGQGTKLEIK |
| J647M2S1-20Vk | 963 | DIQMTQSPSSLSASVGDRVTITCRASQDISNYLNWYQQK |
| | | PGKAPKLLIYYTSRLQSGVPSRFSGSGSGTDYTLTISSL |
| | | QPEDFATYFCQQGNTRPPTFGQGTKLEIK |
| J647M2S1-24Vk | 964 | DIQMTQSPSSLSASVGDRVTITCRASQDISNYLNWYQQK |
| | | PGKAPKLLIYYTSLLQSGVPSRFSGSGSGTDYTLTISSL |
| | | QPEDFATYYCQQGNTGPPTFGQGTKLEIK |
| J647M2S1-25Vk | 965 | DIQMTQSPSSLSASVGDRVTITCRASQDIYNYLNWYQQK |
| | | PGKAPKLLIYYTSRLQSGVPSRFSGSGSGTDYTLTISSL |
| | | QPEDFATYFCQQGNTLPPTFGQGTKLEIK |
| J647M2S1-29Vk | 966 | DIQMTQSPSSLSASVGDRVTITCRASQDISHYLNWYQQK |
| | | PGKAPKLLIYYTSRLQSGVPSRFSGSGSGTDYTLTISSL |
| | | QPEDFATYFCQQGNTLPATFGQGTKLEIK |
| J647M2S1-2Vk | 967 | DIQMTQSPSSLSASVGDRVTITCRASQDISSYLNWYQQK |
| | | PGKTVKLLIYYASRLQSGVPSRFSGSGSGTDFTLTISSL |
| | | QPEDFATYYCQQGNTPPPTFGQGTKLEIK |
| J647M2S1-34Vk | 968 | DIQMTQSPSSLSASVGDRVTITCRASQDISSYLNWYQQK |
| | | PGKAPKLLIYYASRLQSGVPSRFSGSGSGTDFTLTISSL |
| | | QPEDFATYYCQQGNTLPPTFGQGTKLEIK |
| J647M2S1-37Vk | 969 | DIQMTQSPSSLSASVGDRVTITCRASQEISNYLNWYQQK |
| | | PGKAPKLLIYYTSRLQSGVPSRFSGSGSGTDYTLTISSL |
| | | QPEDFATYFCQQGNTMPTTFGQGTKLEIK |
| J647M2S1-38Vk | 970 | DIQMTQSPSSLSASVGDRVTITCRASQDISNYLNWYQQK |
| | | PGKAPKLLIYFASRLQSGVPSRFSGSGSGTDYTLTISSL |
| | | QPEDFATYFCQQGNTPPTTFGQGTKLEIK |
| J647M2S1-3Vk | 971 | DIQMTQSPSSLSASVGDRVTITCRASQDISNYLNWYQQK |
| | | PGKAPKLLIYYTSRLQSGVPSRFSGSGSGTDYTLTISSL |
| | | QPEDFATYFCQQGNTLPSTFGQGTKLEIK |
| J647M2S1-42Vk | 972 | DIQMTQSPSSLSASVGDRVTITCRASQVISNTLNWYQQK |
| | | PGKAPKLLIYYTSRLQSGVPSRFSGSGSGTDYTLTISSL |
| | | QPEDFATYFCQQGNALPPTFGQGTKLEIK |
| J647M2S1-44Vk | 973 | DIQMTQSPSSLSASVGDRVTITCRASQDISTYLNWYQQK |
| | | PGKAPKLLIYYTSRLQSGVPSRFSGSGSGTDFTLTISSL |
| | | QPEDFATYFCQQGNTPPPTFGQGTKLEIK |
| J647M2S1-46Vk | 974 | DIQMTQSPSSLSASVGDRVTITCRASQDISQYLNWYQQK |
| | | PGKAPKLLIYYTSRLQSGVPSRFSGSGSGTDYTLTISSL |
| | | QPEDFATYYCQQGNTLPPTFGQGTKLEIK |
| J647M2S1-50Vk | 975 | DIQMTQSPSSLSASVGDRVTITCRASQDITNYLNWYQQK |
| | | PGKAPKLLIYYTSRLQSGVPSRFSGSGSGTDFTLTISSL |
| | | QPEDFATYYCQQGNTAPPTFGQGTKLEIK |
| J647M2S1-52Vk | 976 | DIQMTQSPSSLSASVGDRVTITCRASQGISNYLNWYQQK |
| | | PGKAPKLLIYYTSRLQSGVPSRFSGSGSGTDYTLTISSL |
| | | QPEDFATYFCQQGNTMPPTFGQGTKLEIK |
| J647M2S1-56Vk | 977 | DIQMTQSPSSLSASVGDRVTITCRASQDISNYLNWYQQK |
| | | PGKAPKLLIYYTSRLQSGVPSRFSGSGSGTDFTLTISSL |
| | | QPEDFATYFCQQGNTLPPTFGQGTKLEIK |
| J647M2S1-59Vk | 978 | DIQMTQSPSSLSASVGDRVTITCRASQDISKYLNWYQQK |
| | | PGKAPKLLIYYTSRLQSGVPSRFSGSGSGTDFTLTISSL |
| | | QPEDFATYYCQQGNTRPPTFGQGTKLEIK |
| J647M2S1-71Vk | 979 | DIQMTQSPSSLSASVGDRVTITCRASQDISNYLNWYQQK |
| | | PGKAPKLLIYYTSLLQSGVPSRFSGSGSGTDFTLTISSL |
| | | QPEDFATYYCQQGNTQPPTFGQGTKLEIK |
| J647M2S1-74Vk | 980 | DIQMTQSPSSLSASVGDRVTITCRASQDISNYLNWYQQK |
| | | PGKAPKLLIYYTSRLQSGVPSRFSGSGSGTDFTLTISSL |
| | | QPEDFATYYCQQGNSQPPTFGQGTKLEIK |
| J647M2S1-78Vk | 981 | DIQMTQSPSSLSASVGDRVTITCRASQDISKYLNWYQQK |
| | | PGKAPKLLIYNASRLQSGVPSRFSGSGSGTDFTLTISSL |
| | | QPEDFATYFCQQGNTLPPTFGQGTKLEIK |
| J647M2S1-7Vk | 982 | DIQMTQSPSSLSASVGDRVTITCRASQDISNYLNWYQQK |
| | | PGKAPKLLIYYTSLLQSGVPSRFSGSGSGTDFTLTISSL |
| | | QPEDFATYYCQQGNIWPPTFGQGTKLEIK |
| J647M2S1-9Vk | 983 | DIQMTQSPSSLSASVGDRVTITCRASQDISHYLNWYQQK |
| | | PGKAPKLLIYYTSRLQSGVPSRFSGSGSGTDYTLTISSL |
| | | QPEDFATYFCQQGNTLPPTFGQGTKLEIK |
| J652M2S1-10Vk | 984 | DIQMTQSPSSLSASVGDRVTITCRASQDISNYLNWYQQK |
| | | PGKAPKLLIYYTSRLQSGVPSRFSGSGSGTDYTLTISSL |
| | | QPEDFATYYCQQGNTFPPTFGQGTKLEIK |
| J652M2S1-13Vk | 985 | DIQMTQSPSSLSASVGDRVTITCRASQDISNYLNWYQQK |
| | | PGKAPKLLIYYTSRLQSGVPSRFSGSGSGTDYTLTISSL |
| | | QPEDFATYFCQQGNTQPPTFGQGTKLEIK |
| J652M2S1-14Vk | 986 | DIQMTQSPSSLSASVGDRVTITCRASQDISNVLNWYQQK |
| | | PGKAPKLLIYYASRLQSGVPSRFSGSGSGTDFTLTISSL |
| | | QPEDFATYYCQQGNTLPPTFGQGTKLEIK |
| J652M2S1-15Vk | 987 | DIQMTQSPSSLSASVGDRVTITCRASQDIYKYLNWYQQK |
| | | PGKAPKLLIYYTSRLQSGVPSRFSGSGSGTDFTLTISSL |
| | | QPEDFATYYCQQGNTMPPTFGQGTKLEIK |
| J652M2S1-17Vk | 988 | DIQMTQSPSSLSASVGDRVTITCRASQEIFSYLNWYQQK |
| | | PGKAPKLLIYYTSRLQSGVPSRFSGSGSGTDFTLTISSL |
| | | QPEDFATYYCQQGNMGPPTFGQGTKLEIK |
| J652M2S1-18Vk | 989 | DIQMTQSPSSLSASVGDRVTITCRASQDISNYLNWYQQK |
| | | PGKAPKLLIYYTSRLQSGVPSRFSGSGSGTDYTLTISSL |
| | | QPEDFATYYCQQGNTQPPTFGQGTKLEIK |
| J652M2S1-1Vk | 990 | DIQMTQSPSSLSASVGDRVTITCRASQDISSYLNWYQQK |
| | | PGKAPKLLIYYASRLQSGVPSRFSGSGSGTDFTLTISSL |
| | | QPEDFATYYCQQGNTWPPTFGQGTKLEIK |
| J652M2S1-22Vk | 991 | DIQMTQSPSSLSASVGDRVTITCRASQDISNYLNWYQQK |
| | | PGKAPKLLIYYTSRLQSGVPSRFSGSGSGTDFTLTISSL |
| | | QPEDFATYYCQQGNTRPPTFGQGTKLEIK |
| J652M2S1-23Vk | 992 | DIQMTQSPSSLSASVGDRVTITCRASQDISNFLNWYQQK |
| | | PGKAPKLLIYYASRLQSGVPSRFSGSGSGTDFTLTISSL |
| | | QPEDFATYFCQQGNTFPPTFGQGTKLEIK |
| J652M2S1-25Vk | 993 | DIQMTQSPSSLSASVGDRVTITCRASQDISNFLNWYQQK |
| | | PGKAPKLLIYYTSRLQSGVPSRFSGSGSGTDYTLTISSL |
| | | QPEDFATYFCQQGNTRPPTFGQGTKLEIK |
| J652M2S1-26Vk | 994 | DIQMTQSPSSLSASVGDRVTITCRASQDINNYLNWYQQK |
| | | PGKAPKLLIYYTSRLQSGVPSRFSGSGSGTDFTLTISSL |
| | | QPEDFATYFCQQGNTQPPTFGQGTKLEIK |
| J652M2S1-27Vk | 995 | DIQMTQSPSSLSASVGDRVTITCRASQDISNYLNWYQQK |
| | | PGKAPKLLIYYASGLQSGVPSRFSGSGSGTDYTLTISSL |
| | | QPEDFATYFCQQGNTWPPTFGQGTKLEIK |
| J652M2S1-28Vk | 996 | DIQMTQSPSSLSASVGDRVTITCRASQDISRYLNWYQQK |
| | | PGKAPKLLIYYTSRLQSGVPSRFSGSGSGTDFTLTISSL |
| | | QPEDFATYYCQQGNTQPPTFGQGTKLEIK |
| J652M2S1-29Vk | 997 | DIQMTQSPSSLSASVGDRVTITCRASQDIATYLNWYQQK |
| | | PGKAPKLLIYYTSRLQSGVPSRFSGSGSGTDFTLTISSL |
| | | QPEDFATYFCQQGNTMPPTFGQGTKLEIK |
| J652M2S1-31Vk | 998 | DIQMTQSPSSLSASVGDRVTITCRASQDISNYLNWYQQK |
| | | PGKAPKLLIYYTSRLQSGVPSRFSGSGSGTDYTLTISSL |
| | | QPEDFATYFCQQGNTFPPTFGQGTKLEIK |
| J652M2S1-33Vk | 999 | DIQMTQSPSSLSASVGDRVTITCRASQRIGNYLNWYQQK |
| | | PGKTVKLLIYYASRLQSGVPSRFSGSGSGTDFTLTISSL |
| | | QPEDFATYFCQQGNTLPPTFGQGTKLEIK |
| J652M2S1-34Vk | 1000 | DIQMTQSPSSLSASVGDRVTITCRASQEISNYLNWYQQK |
| | | PGKAPKLLIYYTSRLQSGVPSRFSGSGSGTDYTLTISSL |
| | | QPEDFATYYCQQGNSQPPTFGQGTKLEIK |
| J652M2S1-35Vk | 1001 | DIQMTQSPSSLSASVGDRVTITCRASQDIANYLNWYQQK |
| | | PGKAPKLLIYYTSRLQSGVPSRFSGSGSGTDFTLTISSL |
| | | QPEDFATYYCQQGNTLPPTFGQGTKLEIK |
| J652M2S1-37Vk | 1002 | DIQMTQSPSSLSASVGDRVTITCRASQDISNYLNWYQQK |
| | | PGKAPKLLIYYASRLQSGVPSRFSGSGSGTDYTLTISSL |
| | | QPEDFATYFCQQGNTFPPTFGQGTKLEIK |
| J652M2S1-38Vk | 1003 | DIQMTQSPSSLSASVGDRVTITCRASQDISNYLNWYQQK |
| | | PGKAPKLLIYYTSRLQSGVPSRFSGSGSGTDFTLTISSL |
| | | QPEDFATYYCQQGNTQPPTFGQGTKLEIK |
| J652M2S1-3Vk | 1004 | DIQMTQSPSSLSASVGDRVTITCRASQDISNYLNWYQQK |
| | | PGKAPKLLIYYTSRLQSGVPSRFSGSGSGTDYTLTISSL |
| | | QPEDFATYFCQQGNTPPPTFGQGTKLEIK |
| J652M2S1-40Vk | 1005 | DIQMTQSPSSLSASVGDRVTITCRASQDISNFLNWYQQK |
| | | PGKAPKLLIYYTSRLQSGVPSRFSGSGSGTDYTLTISSL |
| | | QPEDFATYYCQQGNTLPPTFGQGTKLEIK |
| J652M2S1-41Vk | 1006 | DIQMTQSPSSLSASVGDRVTITCRASQDIGNFLNWYQQK |
| | | PGKAPKLLIYYTSRLQSGVPSRFSGSGSGTDYTLTISSL |
| | | QPEDFATYFCQQGNTRPPTFGQGTKLEIK |
| J652M2S1-42Vk | 1007 | DIQMTQSPSSLSASVGDRVTITCRASQDITNYLNWYQQK |
| | | PGKAPKLLIYYTSRLQSGVPSRFSGSGSGTDYTLTISSL |
| | | QPEDFATYYCQQGNTPPPTFGQGTKLEIK |
| J652M2S1-45Vk | 1008 | DIQMTQSPSSLSASVGDRVTITCRASQDISDYLNWYQQK |
| | | PGKAPKLLIYYTSRLQSGVPSRFSGSGSGTDYTLTISSL |
| | | QPEDFATYFCQQGNMWPPTFGQGTKLEIK |
| J652M2S1-47Vk | 1009 | DIQMTQSPSSLSASVGDRVTITCRASQDISSYLNWYQQK |
| | | PGKAPKLLIYYASRLQSGVPSRFSGSGSGTDFTLTISSL |
| | | QPEDFATYFCQQGNTMPPTFGQGTKLEIK |
| J652M2S1-48Vk | 1010 | DIQMTQSPSSLSASVGDRVTITCRASQDISHYLNWYQQK |
| | | PGKAPKLLIYYTSRLQSGVPSRFSGSGSGTDFTLTISSL |
| | | QPEDFATYYCQQGNTLPPTFGQGTKLEIK |
| J652M2S1-49Vk | 1011 | DIQMTQSPSSLSASVGDRVTITCRASQDISNYLNWYQQK |
| | | PGKAPKLLIYYASRLQSGVPSRFSGSGSGTDFTLTISSL |
| | | QPEDFATYFCQQGNTMPPTFGQGTKLEIK |
| J652M2S1-51Vk | 1012 | DIQMTQSPSSLSASVGDRVTITCRASQDISQYLNWYQQK |
| | | PGKAPKLLIYYTSRLQSGVPSRFSGSGSGTDFTLTISSL |
| | | QPEDFATYFCQQGNTRPPTFGQGTKLEIK |
| J652M2S1-52Vk | 1013 | DIQMTQSPSSLSASVGDRVTITCRASQDISNYLNWYQQK |
| | | PGKAPKLLIYYTSRLQSGVPSRFSGSGSGTDYTLTISSL |
| | | QPEDFATYFCQQGNMRPPTFGQGTKLEIK |
| J652M2S1-53Vk | 1014 | DIQMTQSPSSLSASVGDRVTITCRASQDISTYLNWYQQK |
| | | PGKAPKLLIYYASRLQSGVPSRFSGSGSGTDFTLTISSL |
| | | QPEDFATYFCQQGNTLPPTFGQGTKLEIK |
| J652M2S1-55Vk | 1015 | DIQMTQSPSSLSASVGDRVTITCRASQDISNYLNWYQQK |
| | | PGKAPKLLIYYTSRLQSGVPSRFSGSGSGTDYTLTISSL |
| | | QPEDFATYFCQQGNTGPPTFGQGTKLEIK |
| J652M2S1-56Vk | 1016 | DIQMTQSPSSLSASVGDRVTITCRASQNINNYLNWYQQK |
| | | PGKAPKLLIYYTSRLQSGVPSRFSGSGSGTDYTLTISSL |
| | | QPEDFATYFCQQGNTMPPTFGQGTKLEIK |
| J652M2S1-57Vk | 1017 | DIQMTQSPSSLSASVGDRVTITCRASQDISKYLNWYQQK |
| | | PGKAPKLLIYYTSRLQSGVPSRFSGSGSGTDYTLTISSL |
| | | QPEDFATYYCQQGNTPPPTFGQGTKLEIK |
| J652M2S1-61Vk | 1018 | DIQMTQSPSSLSASVGDRVTITCRASQDISNYLNWYQQK |
| | | PGKAPKLLIYYTSRLQSGVPSRFSGSGSGTDFTLTISSL |
| | | QPEDFATYYCQQGNTVPPTFGQGTKLEIK |
| J652M2S1-62Vk | 1019 | DIQMTQSPSSLSASVGDRVTITCRASQDISNYLNWYQQK |
| | | PGKAPKLLIYYTSKLQSGVPSRFSGSGSGTDYTLTISSL |
| | | QPEDFATYFCQQGNIFPPTFGQGTKLEIK |
| J652M2S1-64Vk | 1020 | DIQMTQSPSSLSASVGDRVTITCRASQGIYNYLNWYQQK |
| | | PGKAPKLLIYYTSRLQSGVPSRFSGSGSGTDYTLTISSL |
| | | QPEDFATYFCQQGNTLPPTFGQGTKLEIK |
| J652M2S1-67Vk | 1021 | DIQMTQSPSSLSASVGDRVTITCRASQDISSYLNWYQQK |
| | | PGKAPKLLIYYTSRLQSGVPSRFSGSGSGTDFTLTISSL |
| | | QPEDFATYYCQQGNTLPPTFGQGTKLEIK |
| J652M2S1-69Vk | 1022 | DIQMTQSPSSLSASVGDRVTITCRASQEISNYLNWYQQK |
| | | PGKAPKLLIYYTSRLQSGVPSRFSGSGSGTDYTLTISSL |
| | | QPEDFATYFCQQGNTGPPTFGQGTKLEIK |
| J652M2S1-6Vk | 1023 | DIQMTQSPSSLSASVGDRVTITCRASQDISNYLNWYQQK |
| | | PGKAPKLLIYYTSRLQSGVPSRFSGSGSGTDFTLTISSL |
| | | QPEDFATYYCQQGNTPPPTFGQGTKLEIK |
| J652M2S1-71Vk | 1024 | DIQMTQSPSSLSASVGDRVTITCRASQDISDYLNWYQQK |
| | | PGKAPKLLIYYTSRLQSGVPSRFSGSGSGTDYTLTISSL |
| | | QPEDFATYYCQQGNTWPPTFGQGTKLEIK |
| J652M2S1-73Vk | 1025 | DIQMTQSPSSLSASVGDRVTITCRASQDIWKYLNWYQQK |
| | | PGKAPKLLIYYASRLQSGVPSRFSGSGSGTDFTLTISSL |
| | | QPEDFATYYCQQGNTLPPTFGQGTKLEIK |
| J652M2S1-75Vk | 1026 | DIQMTQSPSSLSASVGDRVTITCRASQDISTYLNWYQQK |
| | | PGKAPKLLIYYTSRLQSGVPSRFSGSGSGTDYTLTISSL |
| | | QPEDFATYYCQQGNTWPPTFGQGTKLEIK |
| J652M2S1-77Vk | 1027 | DIQMTQSPSSLSASVGDRVTITCRASQDISNYLNWYQQK |
| | | PGKAPKLLIYYTSRLQSGVPSRFSGSGSGTDYTLTISSL |
| | | QPEDFATYYCQQGNTPPPTFGQGTKLEIK |
| J652M2S1-78Vk | 1028 | DIQMTQSPSSLSASVGDRVTITCRASQDISNYLNWYQQK |
| | | PGKAPKLLIYYTSRLQSGVPSRFSGSGSGTDFTLTISSL |
| | | QPEDFATYFCQQGNAPPPTFGQGTKLEIK |
| J652M2S1-79Vk | 1029 | DIQMTQSPSSLSASVGDRVTITCRASQDIYKFLNWYQQK |
| | | PGKAPKLLIYYTSRLQSGVPSRFSGSGSGTDYTLTISSL |
| | | QPEDFATYFCQQGNTLPPTFGQGTKLEIK |
| J652M2S1-80Vk | 1030 | DIQMTQSPSSLSASVGDRVTITCRASQDIFNYLNWYQQK |
| | | PGKAPKLLIYYTSRLQSGVPSRFSGSGSGTDYTLTISSL |
| | | QPEDFATYFCQQGNTLPPTFGQGTKLEIK |
| J652M2S1-82Vk | 1031 | DIQMTQSPSSLSASVGDRVTITCRASQDISNTLNWYQQK |
| | | PGKAPKLLIYYASRLQSGVPSRFSGSGSGTDFTLTISSL |
| | | QPEDFATYFCQQGNTLPPTFGQGTKLEIK |
| J652M2S1-84Vk | 1032 | DIQMTQSPSSLSASVGDRVTITCRASQHISNYLNWYQQK |
| | | PGKAPKLLIYYTSRLQSGVPSRFSGSGSGTDYTLTISSL |
| | | QPEDFATYFCQQGNTQPPTFGQGTKLEIK |
| J652M2S1-86Vk | 1033 | DIQMTQSPSSLSASVGDRVTITCRASQDISNYLNWYQQK |
| | | PGKAPKLLIYYTSRLQSGVPSRFSGSGSGTDYTLTISSL |
| | | QPEDFATYFCQQGNMPPPTFGQGTKLEIK |
| J652M2S1-87Vk | 1034 | DIQMTQSPSSLSASVGDRVTITCRASQDITNYLNWYQQK |
| | | PGKAPKLLIYYTSRLQSGVPSRFSGSGSGTDFTLTISSL |
| | | QPEDFATYFCQQGNTVPPTFGQGTKLEIK |
| J652M2S1-8Vk | 1035 | DIQMTQSPSSLSASVGDRVTITCRASQDISNYLNWYQQK |
| | | PGKAPKLLIYFTSRLQSGVPSRFSGSGSGTDFTLTISSL |
| | | QPEDFATYYCQQGNTQPPTFGQGTKLEIK |
| J652M2S1-90Vk | 1036 | DIQMTQSPSSLSASVGDRVTITCRASQDISKFLNWYQQK |
| | | PGKAPKLLIYYTSRLQSGVPSRFSGSGSGTDYTLTISSL |
| | | QPEDFATYYCQQGNTRPPTFGQGTKLEIK |
| J652M2S1-91Vk | 1037 | DIQMTQSPSSLSASVGDRVTITCRASQDISNYLNWYQQK |
| | | PGKAPKLLIYYTSRLQSGVPSRFSGSGSGTDFTLTISSL |
| | | QPEDFATYFCQQGNTFPPTFGQGTKLEIK |
| J652M2S1-92Vk | 1038 | DIQMTQSPSSLSASVGDRVTITCRASQDIYNVLNWYQQK |
| | | PGKAPKLLIYYASRLQSGVPSRFSGSGSGTDFTLTISSL |
| | | QPEDFATYFCQQGITLPPTFGQGTKLEIK |
| J652M2S1-93Vk | 1039 | DIQMTQSPSSLSASVGDRVTITCRASQHISNYLNWYQQK |
| | | PGKAPKLLIYYTSRLQSGVPSRFSGSGSGTDYTLTISSL |
| | | QPEDFATYFCQQGNTWPPTFGQGTKLEIK |
| J652M2S1-95Vk | 1040 | DIQMTQSPSSLSASVGDRVTITCRASQDISNYLNWYQQK |
| | | PGKAPKLLIYYTSRLQSGVPSRFSGSGSGTDYTLTISSL |
| | | QPEDFATYFCQQGNTQPSTFGQGTKLEIK |
| J652M2S1-9Vk | 1041 | DIQMTQSPSSLSASVGDRVTITCRASQDISNYLNWYQQK |
| | | PGKAPKLLIYYTSRLQSGVPSRFSGSGSGTDFTLTISSL |
| | | QPEDFATYFCQQGNTQPPTFGQGTKLEIK |
| J662M2S3-13Vk | 1042 | DIQMTQSPSSLSASVGDRVTITCRASQDISNYLNWYQQK |
| | | PGKAPKLLIYYTSRLQSGVPSRFSGSGSGTDYTLTISSL |
| | | QPEDFATYFCQQGNSWPPTFGQGTKLEIK |
| J662M2S3-15Vk | 1043 | DIQMTQSPSSLSASVGDRVTITCRASQDIYNYLNWYQQK |
| | | PGKAPKLLIYYTSRLQSGVPSRFSGSGSGTDYTLTISSL |
| | | QPEDFATYFCQQGNTQPPTFGQGTKLEIK |
| J662M2S3-21Vk | 1044 | DIQMTQSPSSLSASVGDRVTITCRASQDISNYLNWYQQK |
| | | PGKAPKLLIYYTSRLQSGVPSRFSGSGSGTDYTLTISSL |
| | | QPEDFATYFCQQGNTWPPTFGQGTKLEIK |
| J662M2S3-22Vk | 1045 | DIQMTQSPSSLSASVGDRVTITCRASQDISQYLNWYQQK |
| | | PGKAPKLLIYYTSRLQSGVPSRFSGSGSGTDFTLTISSL |
| | | QPEDFATYFCQQGNTWPPTFGQGTKLEIK |
| J662M2S3-34Vk | 1046 | DIQMTQSPSSLSASVGDRVTITCRASQDIYDVLNWYQQK |
| | | PGKAPKLLIYYASRLQSGVPSRFSGSGSGTDFTLTISSL |
| | | QPEDFATYYCQQGITLPPTFGQGTKLEIK |
| J662M2S3-3Vk | 1047 | DIQMTQSPSSLSASVGDRVTITCRASQDIENYLNWYQQK |
| | | PGKAPKLLIYYTSRLQSGVPSRFSGSGSGTDFTLTISSL |
| | | QPEDFATYFCQQGNTQPPTFGQGTKLEIK |
| J662M2S3-41Vk | 1048 | DIQMTQSPSSLSASVGDRVTITCRASQNIENFLNWYQQK |
| | | PGKAPKLLIYYTSRLQSGVPSRFSGSGSGTDFTLTISSL |
| | | QPEDFATYFCQQGNTWPPTFGQGTKLEIK |
| J662M2S3-56Vk | 1049 | DIQMTQSPSSLSASVGDRVTITCRASQDIYNYLNWYQQK |
| | | PGKAPKLLIYYTSRLQSGVPSRFSGSGSGTDYTLTISSL |
| | | QPEDFATYFCQQGNTPPPTFGQGTKLEIK |
| J662M2S3-64Vk | 1050 | DIQMTQSPSSLSASVGDRVTITCRASQDIASYLNWYQQK |
| | | PGKAPKLLIYYTSRLQSGVPSRFSGSGSGTDFTLTISSL |
| | | QPEDFATYFCQQGNTQPPTFGQGTKLEIK |
| J662M2S3-78Vk | 1051 | DIQMTQSPSSLSASVGDRVTITCRASQDISNYLNWYQQK |
| | | PGKVPKLLIYYTSRLQSGVPSRFSGSGSGTDYTLTISSL |
| | | QPEDFATYFCQQGNTQPPTFGQGTKLEIK |
| J662M2S3-84Vk | 1052 | DIQMTQSPSSLSASVGDRVTITCRASQNIYNVLNWYQQK |
| | | PGKAPKLLIYYASRLQSGVPSRFSGSGSGTDFTLTISSL |
| | | QPEDFATYFCQQGNTMPPTFGQGTKLEIK |

TABLE 29
Amino acid residues observed in affinity matured hMAK-199 antibodies
MAK199 Heavy chain variable region (SEQ ID NO: 1077)

| | |
|---|---|
| MAK199VH.2a | 1234567890123456789012345678901234567890123456789012a345678901 |
| | EIQLVQSGAEVKKPGASVKVSCKASGYTFTNYGMNWVRQAPGQGLEWMGWINTYTGEPTYAD |
| | V ND II N K S Q |
| | AH T S V H |
| | ST Q Q N |
| | RS S R M |
| | DQ G L K |
| | KK A S A |
| | P V N R |
| | Q I Q |
| | M D D |
| | G A |
| | E |
| | 234567890123456789012abc345678901234567890abcdefg1234567890123 |
| | DFKGRFTFTLDTSTSTAYMELSSLRSEDTAVYFCARKFLTTVVVTDYAMDYWGQGTTVTVSS |
| | GLT V M T Y RLFNPMDASENT |
| | K Q NYMKVEAEM SR |
| | IRSSAEMN CC |
| | VSRARSD H |
| | CWL IMG D |
| | QP QII I |
| | VF GPQ F |
| | ND D P V |
| | GM N L |
| | CA L A |
| | H |

Mak199 Light chain variable region (SEQ ID NO: 1078)

| | |
|---|---|
| Mak199Vk.1a | 1234567890123456789012345678901234567890123456789012345678901 |
| | DIQMTQSPSSLSASVGDRVTITCRASQDISNYLNWYQQKPGKTVKLLIYYTSRLQSGVPSR |
| | N YQV AP FA L |
| | E ESF V N K |
| | H AKT G |
| | G TT |
| | V WH |
| | R GD |
| | A NR |
| | F |
| | C |
| | 234567890123456789012345678901234567890123456a |
| | FSGSGSGTDYTLTISSLQPEDFATYFCQQGNTLPPTFGQGTKLEIK |
| | F Y ISW T |
| | MQ S |
| | IP A |
| | AM |
| | RR |
| | F |
| | G |
| | V |
| | Y |
| | A |

TABLE 30
Individual hMAK-199 VII sequences from converted clones

| Protein | | | Sequence |
|---|---|---|---|
| region | | SEQ ID NO: | 123456789012345678901234567890 |
| J662M2S3 | | 1053 | EVQLVQSGAEVKKPGASVKVSCKASGYTFA |
| #10 VH | | | NYGIIWVRQAPGQGLEWMGWINTYTGKPTY |
| | | | AQKFQGRVTMTTDTSTSTAYMELSSLRSED |
| | | | TAVYYCARKLFTTMDVTDNAMDYWGQGTTV |
| | | | TVSS |
| J662M2S3# | CDR-H1 | Residues 31-35 | NYGII |
| 10 VH | | of SEQ ID | |
| | | NO.: 1053 | |
| J662M2S3# | CDR-H2 | Residues 50-66 | WINTYTGKPTYAQKFQG |
| 10 VH | | of SEQ ID | |
| | | NO.: 1053 | |
| J662M2S3# | CDR-H3 | Residues 99-112 | RASQDISQYLN |
| 10 VH | | of SEQ ID | |
| | | NO.: 1053 | |
| J662M2S3# | | 1054 | EVQLVQSGAEVKKPGASVKVSCKASGYTFN |
| 13 VH | | | NYGIIWVRQAPGQGLEWMGWINTYTGKPTY |
| | | | AQKLQGRVTMTTDTSTSTAYMELSSLRSED |
| | | | TAVYFCARKLFNTVDVTDNAMDYWGQGTTV |
| | | | TVSS |
| J662M2S3# | CDR-H1 | Residues 31-35 | NYGII |
| 13 VH | | of SEQ ID | |
| | | NO.: 1054 | |
| J662M2S3# | CDR-H2 | Residues 50-66 | WINTYTGKPTYAQKLQG |
| 13 VH | | of SEQ ID | |
| | | NO.: 1054 | |
| J662M2S3# | CDR-H3 | Residues 99-112 | KLFNTVDVTDNAMD |
| 13 VH | | of SEQ ID | |
| | | NO.: 1054 | |
| J662M2S3# | | 1055 | EVQLVQSGAEVKKPGASVKVSCKASGYTFN |
| 15 VH | | | NYGIIWVRQAPGQGLEWMGWINTYTGVPTY |
| | | | AQKFQGRVTMTTDTSTSTAYMELSSLRSED |
| | | | TAVYYCARKLFNTVDVTDNAMDYWGQGTTV |
| | | | TVSS |
| J662M2S3# | CDR-H1 | Residues 31-35 | NYGII |
| 15 VH | | of SEQ ID | |
| | | NO.: 1055 | |
| J662M2S3# | CDR-H2 | Residues 50-66 | WINTYTGVPTYAQKFQG |
| 15 VH | | of SEQ ID | |
| | | NO.: 1055 | |
| J662M2S3# | CDR-H3 | Residues 99-112 | KLFNTVDVTDNAMD |
| 15 VH | | of SEQ ID | |
| | | NO.: 1055 | |
| J662M2S3# | | 1056 | EVQLVQSGAEVKKPGASVKVSCKASGYTFN |
| 16 VH | | | NYGIIWVRQAPGQGLEWMGWINTYTGKPTY |
| | | | AQKFQGRVTMTTDTSTSTAYMELSSLRSED |
| | | | TAVYYCARKLFNTVAVTDNAMDYWGQGTTV |
| | | | TVSS |
| J662M2S3# | CDR-H1 | Residues 31-35 | NYGII |
| 16 VH | | of SEQ ID | |
| | | NO.: 1056 | |
| J662M2S3# | CDR-H2 | Residues 50-66 | WINTYTGKPTYAQKFQG |
| 16 VH | | of SEQ ID | |
| | | NO.: 1056 | |
| J662M2S3# | CDR-H3 | Residues 99-112 | KLFNTVAVTDNAMD |
| 16 VH | | of SEQ ID | |
| | | NO.: 1056 | |
| J662M2S3# | | 1057 | EVQLVQSGAEVKKPGASVKVSCKASGYTFR |
| 21 VH | | | NYGIIWVRQAPGQGLEWMGWINTYTGKPTY |
| | | | AQKFQGRVTMTTDTSTSTAYMELSSLRSED |
| | | | TAVYFCARKLFTTVDVTDNAMDYWGQGTTV |
| | | | TVSS |
| J662M2S3# | CDR-H1 | Residues 31-35 | NYGII |
| 21 VH | | of SEQ ID | |
| | | NO.: 1057 | |
| J662M2S3# | CDR-H2 | Residues 50-66 | WINTYTGKPTYAQKFQG |
| 21 VH | | of SEQ ID | |
| | | NO.: 1057 | |
| J662M2S3# | CDR-H3 | Residues 99-112 | KLFTTVDVTDNAMD |
| 21 VH | | of SEQ ID | |
| | | NO.: 1057 | |
| J662M2S3# | | 1058 | EVQLVQSGAEVKKPGASVKVSCKASGYTFN |
| 34 VH | | | NYGINWVRQAPGQGLEWMGWINTYTGKPTY |
| | | | AQKFQGRVTMTTDTSTSTAYMELSSLRSED |
| | | | TAVYFCARKFRNTVAVTDYAMDYWGQGTTV |
| | | | TVSS |
| J662M2S3# | CDR-H1 | Residues 31-35 | NYGIN |
| 34 VH | | of SEQ ID | |
| | | NO.: 1058 | |
| J662M2S3# | CDR-H2 | Residues 50-66 | WINTYTGKPTYAQKFQG |
| 34 VH | | of SEQ ID | |
| | | NO.: 1058 | |
| J662M2S3# | CDR-H3 | Residues 99-112 | KFRNTVAVTDYAMD |
| 34 VH | | of SEQ ID | |
| | | NO.: 1058 | |
| J662M2S3# | | 1059 | EVQLVQSGAEVKKPGASVKVSCKASGYTFR |
| 36 VH | | | NYGITWVRQAPGQGLEWMGWINTYTGKPTY |
| | | | AQKFQGRVTMTTDTSTSTAYMELSSLRSED |
| | | | TAVYFCARKLFTTMDVTDNAMDYWGQGTTV |
| | | | TVSS |
| J662M2S3# | CDR-H1 | Residues 31-35 | NYGIT |
| 36 VH | | of SEQ ID | |
| | | NO.: 1059 | |
| J662M2S3# | CDR-H2 | Residues 50-66 | WINTYTGKPTYAQKFQG |
| 36 VH | | of SEQ ID | |
| | | NO.: 1059 | |
| J662M2S3# | CDR-H3 | Residues 99-112 | KLFTTMDVTDNAMD |
| 36 VH | | of SEQ ID | |
| | | NO.: 1059 | |
| J662M2S3# | | 1060 | EVQLVQSGAEVKKPGASVKVSCKASGYTFA |
| 45 VH | | | NYGIIWVRQAPGQGLEWMGWINTYTGKPTY |
| | | | AQKFQGRVTMTTDTSTSTAYMELSSLRSED |
| | | | TAVYYCARKLFTTMDVTDNAMDYWGQGTTV |
| | | | TVSS |
| J662M2S3# | CDR-H1 | Residues 31-35 | NYGII |
| 45 VH | | of SEQ ID | |
| | | NO.: 1060 | |
| J662M2S3# | CDR-H2 | Residues 50-66 | WINTYTGKPTYAQKFQG |
| 45 VH | | of SEQ ID | |
| | | NO.: 1060 | |
| J662M2S3# | CDR-H3 | Residues 99-112 | KLFTTMDVTDNAMD |
| 45 VH | | of SEQ ID | |
| | | NO.: 1060 | |
| J662M2S3# | | 1061 | EVQLVQSGAEVKKPGASVKVSCKASGYTFS |
| 58 VH | | | NYGINWVRQAPGQGLEWMGWINTYTGQPSY |
| | | | AQKFQGRVTMTTDTSTSTAYMELSSLRSED |
| | | | TAVYYCARKLFKTEAVTDYAMDYWGQGTTV |
| | | | TVSS |
| J662M2S3# | CDR-H1 | Residues 31-35 | NYGIN |
| 58 VH | | of SEQ ID | |
| | | NO.: 1061 | |
| J662M2S3# | CDR-H2 | Residues 50-66 | WINTYTGQPSYAQKFQG |
| 58 VH | | of SEQ ID | |
| | | NO.: 1061 | |
| J662M2S3# | CDR-H3 | Residues 99-112 | KLFKTEAVTDYAMD |
| 58 VH | | of SEQ ID | |
| | | NO.: 1061 | |
| J662M2S3# | | 1062 | EVQLVQSGAEVKKPGASVKVSCKASGYTFN |
| 72 VH | | | NYGIIWVRQAPGQGLEWMGWINTYSGKPTY |
| | | | AQKFQGRVTMTTDTSTSTAYMELSSLRSED |
| | | | TAVYFCARKLFTTMDVTDNAMDYWGQGTTV |
| | | | TVSS |
| J662M2S3# | CDR-H1 | Residues 31-35 | NYGII |
| 72 VH | | of SEQ ID | |
| | | NO.: 1062 | |
| J662M2S3# | CDR-H2 | Residues 50-66 | WINTYSGKPTYAQKFQG |
| 72 VH | | of SEQ ID | |
| | | NO.: 1062 | |
| J662M2S3# | CDR-H3 | Residues 99-112 | KLFTTMDVTDNAMD |
| 72 VH | | of SEQ ID | |
| | | NO.: 1062 | |

TABLE 31
Individual hMAK-199 clones VL sequences

| Protein | | | Sequence |
|---|---|---|---|
| region | | SEQ ID NO: | 123456789012345678901234567890 |
| J662M2S3# | | 1063 | DIQMTQSPSSLSASVGDRVTITCRASQDIS |
| 10 VL | | | QYLNWYQQKPGKAPKLLIYYTSRLQSGVPS |
| | | | RFSGSGSGTDFTLTISSLQPEDFATYFCQQ |
| | | | GNTWPPTFGQGTKLEIK |
| J662M2S3#10 | CDR-L1 | Residues 24-34 | RASQDISQYLN |
| VL | | of SEQ ID | |
| | | NO.: 1063 | |
| J662M2S3#10 | CDR-L2 | Residues 50-56 | YTSRLQS |
| VL | | of SEQ ID | |
| | | NO.: 1063 | |
| J662M2S3#10 | CDR-L3 | Residues 89-97 | QQGNTWPPT |
| VL | | of SEQ | |
| | | ID NO.: 1063 | |
| J662M2S3#13 | | 1064 | DIQMTQSPSSLSASVGDRVTITCRASQDIS |
| VL | | | NYLNWYQQKPGKAPKLLIYYTSRLQSGVPS |
| | | | RFSGSGSGTDYTLTISSLQPEDFATYFCQQ |
| | | | GNSWPPTFGQGTKLEIK |
| J662M2S3#13 | CDR-L1 | Residues 24-34 | RASQDISNYLN |
| VL | | of SEQ ID | |
| | | NO.: 1064 | |
| J662M2S3#13 | CDR-L2 | Residues 50-56 | YTSRLQS |
| VL | | of SEQ ID | |
| | | NO.: 1064 | |
| J662M2S3#13 | CDR-L3 | Residues 89-97 | QQGNSWPPT |
| VL | | of SEQ | |
| | | ID NO.: 1064 | |
| J662M2S3#15 | | 1065 | DIQMTQSPSSLSASVGDRVTITCRASQDIY |
| VL | | | NYLNWYQQKPGKAPKLLIYYTSRLQSGVPS |
| | | | RFSGSGSGTDYTLTISSLQPEDFATYFCQQ |
| | | | GNTQPPTFGQGTKLEIK |
| J662M2S3#15 | CDR-L1 | Residues 24-34 | RASQDIYNYLN |
| VL | | of SEQ ID | |
| | | NO.: 1065 | |
| J662M2S3#15 | CDR-L2 | Residues 50-56 | YTSRLQS |
| VL | | of SEQ ID | |
| | | NO.: 1065 | |
| J662M2S3#15 | CDR-L3 | Residues 89-97 | QQGNTQPPT |
| VL | | of SEQ | |
| | | ID NO.: 1065 | |
| J662M2S3#16 | | 1066 | DIQMTQSPSSLSASVGDRVTITCRASQDIE |
| VL | | | NYLNWYQQKPGKAPKLLIYYTSRLQSGVPS |
| | | | RFSGSGSGTDFTLTISSLQPEDFATYFCQQ |
| | | | GNTQPPTFGQGTKLEIK |
| J662M2S3#16 | CDR-L1 | Residues 24-34 | RASQDIENYLN |
| VL | | of SEQ ID | |
| | | NO.: 1066 | |
| J662M2S3#16 | CDR-L2 | Residues 50-56 | YTSRLQS |
| VL | | of SEQ ID | |
| | | NO.: 1066 | |
| J662M2S3#16 | CDR-L3 | Residues 89-97 | QQGNTQPPT |
| VL | | of SEQ | |
| | | ID NO.: 1066 | |
| J662M2S3#21 | | 1067 | DIQMTQSPSSLSASVGDRVTITCRASQDIS |
| VL | | | NYLNWYQQKPGKAPKLLIYYTSRLQSGVPS |
| | | | RFSGSGSGTDYTLTISSLQPEDFATYFCQQ |
| | | | GNTWPPTFGQGTKLEIK |
| J662M2S3#21 | CDR-L1 | Residues 24-34 | RASQDISNYLN |
| VL | | of SEQ ID | |
| | | NO.: 1067 | |
| J662M2S3#21 | CDR-L2 | Residues 50-56 | YTSRLQS |
| VL | | of SEQ ID | |
| | | NO.: 1067 | |
| J662M2S3#21 | CDR-L3 | Residues 89-97 | QQGNTWPPT |
| VL | | of SEQ | |
| | | ID NO.: 1067 | |
| J662M2S3#34 | | 1068 | DIQMTQSPSSLSASVGDRVTITCRASQDIY |
| VL | | | DVLNWYQQKPGKAPKLLIYYASRLQSGVPS |
| | | | RFSGSGSGTDFTLTISSLQPEDFATYYCQQ |
| | | | GITLPPTFGQGTKLEIK |
| J662M2S3#34 | CDR-L1 | Residues 24-34 | RASQDIYDVLN |
| VL | | of SEQ ID | |
| | | NO.: 1068 | |
| J662M2S3#34 | CDR-L2 | Residues 50-56 | YASRLQS |
| 4 VL | | of SEQ ID | |
| | | NO.: 1068 | |
| J662M2S3#34 | CDR-L3 | Residues 89-97 | QQGITLPPT |
| VL | | of SEQ | |
| | | ID NO.: 1068 | |
| J662M2S3#36 | | 1069 | DIQMTQSPSSLSASVGDRVTITCRASQDIS |
| VL | | | NYLNWYQQKPGKAPKLLIYYTSRLQSGVPS |
| | | | RFSGSGSGTDYTLTISSLQPEDFATYFCQQ |
| | | | GNTWPPTFGQGTKLEIK |
| J662M2S3#36 | CDR-L1 | Residues 24-34 | RASQDISNYLN |
| VL | | of SEQ ID | |
| | | NO.: 1069 | |
| J662M2S3#36 | CDR-L2 | Residues 50-56 | YTSRLQS |
| VL | | of SEQ ID | |
| | | NO.: 1069 | |
| J662M2S3#36 | CDR-L3 | Residues 89-97 | QQGNTWPPT |
| VL | | of SEQ | |
| | | ID NO.: 1069 | |
| J662M2S3#45 | | 1070 | DIQMTQSPSSLSASVGDRVTITCRASQDIS |
| VL | | | QYLNWYQQKPGKAPKLLIYYTSRLQSGVPS |
| | | | RFSGSGSGTDFTLTISSLQPEDFATYFCQQ |
| | | | GNTWPPTFGQGTKLEIK |
| J662M2S3#45 | CDR-L1 | Residues 24-34 | RASQDISQYLN |
| VL | | of SEQ ID | |
| | | NO.: 1070 | |
| J662M2S3#45 | CDR-L2 | Residues 50-56 | YTSRLQS |
| VL | | of SEQ ID | |
| | | NO.: 1070 | |
| J662M2S3#45 | CDR-L3 | Residues 89-97 | QQGNTWPPT |
| VL | | of SEQ | |
| | | ID NO.: 1070 | |
| J662M2S3#58 | | 1071 | DIQMTQSPSSLSASVGDRVTITCRASQNIY |
| VL | | | NVLNWYQQKPGKAPKLLIYYASRLQSGVPS |
| | | | RFSGSGSGTDFTLTISSLQPEDFATYFCQQ |
| | | | GNTMPPTFGQGTKLEIK |
| J662M2S3#58 | CDR-L1 | Residues 24-34 | RASQNIYNVLN |
| VL | | of SEQ ID | |
| | | NO.: 1071 | |
| J662M2S3#58 | CDR-L2 | Residues 50-56 | YASRLQS |
| VL | | of SEQ ID | |
| | | NO.: 1071 | |
| J662M2S3#58 | CDR-L3 | Residues 89-97 | QQGNTMPPT |
| VL | | of SEQ | |
| | | ID NO.: 1071 | |
| J662M2S3#72 | | 1072 | DIQMTQSPSSLSASVGDRVTITCRASQDIS |
| VL | | | NFLNWYQQKPGKAPKLLIYYTSRLQSGVPS |
| | | | RFSGSGSGTDYTLTISSLQPEDFATYFCQQ |
| | | | GNTQPPTFGQGTKLEIK |
| J662M2S3#72 | CDR-L1 | Residues 24-34 | RASQDISNFLN |
| VL | | of SEQ ID | |
| | | NO.: 1072 | |
| J662M2S3#72 | CDR-L2 | Residues 50-56 | YTSRLQS |
| VL | | of SEQ ID | |
| | | NO.: 1072 | |
| J662M2S3#72 | CDR-L3 | Residues 89-97 | QQGNTQPPT |
| VL | | of SEQ | |
| | | ID NO.: 1072 | |

TABLE 32
hMAK199 affinity matured scFv clones converted to full length IgG

| ScFv | | | Full length IgG |
|---|---|---|---|
| clone name | HC plasmid | LC plasmid | (protein) name |
| J662M2S3#10 | pHybE-hCg1,z,non-a V2 | pHybE-hCk V3 J662 | hMAK199-AM1 |
| | J662M2S3#10 | M2S3#10 | |
| J662M2S3#13 | pHybE-hCg1,z,non-a V2 | pHybE-hCk V3 J662 | hMAK199-AM2 |
| | J662M2S3#13 | M2S3#13 | |
| J662M2S3#15 | pHybE-hCg1,z,non-a V2 | pHybE-hCk V3 J662 | hMAK199-AM3 |
| | J662M2S3#15 | M2S3#15 | |
| J662M2S3#16 | pHybE-hCg1,z,non-a V2 | pHybE-hCk V3 J662 | hMAK199-AM4 |
| | J662M2S3#16 | M2S3#16 | |
| J662M2S3#21 | pHybE-hCg1,z,non-a V2 | pHybE-hCk V3 J662 | hMAK199-AM5 |
| | J662M2S3#21 | M2S3#21 | |
| J662M2S3#34 | pHybE-hCg1,z,non-a V2 | pHybE-hCk V3 J662 | hMAK199-AM6 |
| | J662M2S3#34 | M2S3#34 | |
| J662M2S3#36 | pHybE-hCg1,z,non-a V2 | pHybE-hCk V3 J662 | hMAK199-AM7 |
| | J662M2S3#36 | M2S3#36 | |
| J662M2S3#45 | pHybE-hCg1,z,non-a V2 | pHybE-hCk V3 J662 | hMAK199-AM8 |
| | J662M2S3#45 | M2S3#45 | |
| J662M2S3#58 | pHybE-hCg1,z,non-a V2 | pHybE-hCk V3 J662 | hMAK199-AM9 |
| | J662M2S3#58 | M2S3#58 | |
| J662M2S3#72 | pHybE-hCg1,z,non-a V2 | pHybE-hCk V3 J662 | hMAK199-AM10 |
| | J662M2S3#72 | M2S3#72 | |

### 3.1 TNF Enzyme-Linked Immunosorbent Assay Result

TABLE 33
hMAK199 affinity matured full length IgG

| IgG Name | EC50 in hTNFa ELISA(nM) |
|---|---|
| hMAK199-AM1 | 0.016 |
| hMAK199-AM2 | 0.016 |
| hMAK199-AM3 | 0.019 |
| hMAK199-AM4 | 0.050 |
| hMAK199-AM5 | 0.078 |
| hMAK199-AM6 | 0.035 |
| hMAK199-AM7 | 0.100 |
| hMAK199-AM8 | 0.219 |
| hMAK199-AM9 | 0.032 |
| hMAK199-AM10 | 0.014 |

### 3.2 TNF Neutralization Potency of TNF Antibodies by L929 Bioassay

TABLE 34

| | hu TNF neutralization | rhesus TNF neutralization |
|---|---|---|
| IgG Name | IC50 (nM) | IC50 (nM) |
| hMAK199-AM1 | 0.054 | 0.012 |
| hMAK199-AM2 | 0.029 | 0.010 |
| hMAK199-AM3 | 0.051 | 0.019 |
| hMAK199-AM4 | 0.028 | 0.005 |
| hMAK199-AM5 | 0.087 | 0.020 |
| hMAK199-AM6 | 0.033 | 0.004 |
| hMAK199-AM7 | 0.095 | 0.051 |
| hMAK199-AM8 | 0.247 | 0.204 |
| hMAK199-AM9 | 0.163 | 0.089 |
| hMAK199-AM10 | 0.048 | 0.034 |

### Example 4

### Example 4.4

### Affinity Determination Using BIACORE Technology

TABLE 35
Reagent for Biacore Analyses

| Antigen | Vendor Designation | Vendor | Catalog # |
|---|---|---|---|
| TNFα | Recombinant Human TNF- | R&D | 210-TA |
| | α/TNFSF1A | systems | |

### BIACORE Methods:

[0140] The BIACORE assay (Biacore, Inc. Piscataway, N.J.) determines the affinity of binding proteins with kinetic measurements of on-rate and off-rate constants. Binding of binding proteins to a target antigen (for example, a purified recombinant target antigen) is determined by surface plasmon resonance-based measurements with a Biacore® 1000 or 3000 instrument (Biacore® AB, Uppsala, Sweden) using running HBS-EP (10 mM HEPES [pH 7.4], 150 mM NaCl, 3 mM EDTA, and 0.005% surfactant P20) at 25° C. All chemicals are obtained from Biacore® AB (Uppsala, Sweden) or otherwise from a different source as described in the text. For example, approximately 5000 RU of goat anti-mouse IgG, (Fcγ), fragment specific polyclonal antibody (Pierce Biotechnology Inc, Rockford, Ill., US) diluted in 10 mM sodium acetate (pH 4.5) is directly immobilized across a CM5 research grade biosensor chip using a standard amine coupling kit according to manufacturer's instructions and procedures at 25 μg/ml. Unreacted moieties on the biosensor surface are blocked with ethanolamine. Modified carboxymethyl dextran surface in flowcell 2 and 4 is used as a reaction surface. Unmodified carboxymethyl dextran without goat anti-mouse IgG in flow cell 1 and 3 is used as the reference surface. For kinetic analysis, rate equations derived from the 1:1 Langmuir binding model are fitted simultaneously to association and dissociation phases of all eight injections (using global fit analysis) with the use of Biaevaluation 4.0.1 software. Purified antibodies are diluted in HEPES-buffered saline for capture across goat anti-mouse IgG specific reaction surfaces. Antibodies to be captured as a ligand (25 μg/ml) are injected over reaction matrices at a flow rate of 5 μl/minute. The association and dissociation rate constants, kₒₙ (M⁻¹s⁻¹) and k_{off} (s⁻¹), are determined under a continuous flow rate of 25 μl/minute. Rate constants are derived by making kinetic binding measurements at different antigen concentrations ranging from 10-200 nM. The equilibrium dissociation constant (M) of the reaction between antibodies and the target antigen is then calculated from the kinetic rate constants by the following formula: K_{D}=k_{off}/kₒₙ. Binding is recorded as a function of time and kinetic rate constants are calculated. In this assay, on-rates as fast as 10⁶ M⁻¹s⁻¹ and off-rates as slow as 10⁻⁶ s⁻¹ can be measured.

[0141] The binding proteins herein are expected to have beneficial properties in this regard, including high affinity, slow off rate, and high neutralizing capacity.

### Example 4.5

### Neutralization of Human TNF-α

[0142] L929 cells are grown to a semi-confluent density and harvested using 0.25% trypsin (Gibco #25300). The cells are washed with PBS, counted and resuspended at 1E6 cells/mL in assay media containing 4 μg/mL actinomycin D. The cells are seeded in a 96-well plate (Costar #3599) at a volume of 100 μL and 5E4 cells/well. The binding proteins and control IgG are diluted to a 4× concentration in assay media and serial 1:4 dilutions are performed. The huTNF-α is diluted to 400 pg/mL in assay media. Binding protein sample (200 μL) is added to the huTNF-α (200 μL) in a 1:2 dilution scheme and allowed to incubate for 0.5 hour at room temperature.

[0143] The binding protein/human TNF-α solution is added to the plated cells at 100 μL for a final concentration of 100 pg/mL huTNF-α and 150 nM-0.0001 nM binding protein. The plates are incubated for 20 hours at 37° C., 5% CO₂. To quantitate viability, 100 μL is removed from the wells and 10 μL of WST-1 reagent (Roche cat #11644807001) is added. Plates are incubated under assay conditions for 3.5 hours. The plates are read at OD 420-600 nm on a Spectromax 190 ELISA plate reader.

[0144] The binding proteins herein are expected to have beneficial properties in this regard, including high affinity, slow off rate, and high neutralizing capacity.

### Example 4.6

### Treatment

[0145] A patient requiring treatment with a TNF-α binding protein may have a disease with immune and inflammatory elements, such as autoimmune diseases, particularly those assocated with inflammation, including Crohn's disease, psoriasis (including plaque psoriasis), arthritis (including rheumatoid arthritis, psoratic arthritis, osteoarthritis, or juvenile idiopathic arthritis), multiple sclerosis, and ankylosing spondylitis. Therefore, the binding proteins herein may be used to treat these disorders.

[0146] Administration of the TNF-α binding protein may occur by subcutaneous injection. If the patient has rheumatoid arthritis, psoratic arthritis, or ankylosing spondyitis, the patient may receive 40 mg every other week as a starting dose and 40 mg every week, if necessary to achieve treatment goals. If the patient has juvenile idiopathic arthritis and weighs from 15 kg to <30 kg, the patient may receive 20 mg every other week, and if ≧30 kg, 40 mg every other week. If the patient has Crohn's disease, the patient may receive an initial dose of 160 mg (four 40 mg injections in one day or two 40 mg injections per day for two consecutive days) followed by 80 mg two weeks later, and another two weeks later begin a maintenance dose of 40 mg every other week. If the patient has plaque psoriasis, the patient may receive an 80 mg initial dose, followed by 40 mg every other week starting one week after initial dose.

[0147] The binding protein may be provided in a single-use prefilled pen (40 mg/0.8 mL), a single-use prefilled glass syringe (40 mg/0.8 mL or 20 mg/0.4 mL).

### INCORPORATION BY REFERENCE

[0148] The contents of all cited references (including literature references, patents, patent applications, and websites) that are cited throughout this application are hereby expressly incorporated by reference in their entirety, as are the references cited therein. The practice disclosed herein will employ, unless otherwise indicated, conventional techniques of immunology, molecular biology and cell biology, which are well known in the art.

### EQUIVALENTS

[0149] The invention may be embodied in other specific forms without departing from the spirit or essential characteristics thereof. The foregoing embodiments are therefore to be considered in all respects illustrative rather than limiting of the invention described herein. Scope of the invention is thus indicated by the appended claims rather than by the foregoing description, and all changes that come within the meaning and range of equivalency of the claims are therefore intended to be embraced herein.

The application's sequence listing, which the Patent Office published only in electronic form, follows.

SEQUENCE LISTING (1078 sequences)

SEQ ID NO: 1 - protein, 157 aa, Homo sapiens
VRSSSRTPSDKPVAHVVANPQAEGQLQWLNDRANALLANGVELRDNQLVVPSEGLYLIYSQVLFKGQGCPSTHVLLTHTISRIAVSYQTKVNLLSAIKSPCQRETPEGAEAKPWYEPIYLGGVFQLEKGDRLSAEINRPDYLDFAESGQVYFGIIAL

SEQ ID NO: 2 - protein, 330 aa, Homo sapiens
ASTKGPSVFFLAPSSKSTSGGTAALGCLVKDYFPEPVTVSWNSGALTSGVHTFPAVLQSSGLYSLSSVVTVPSSSLGTQTYICNVNHKPSNTKVDKKVEPKSCDKTHTCPPCPAPELLGGPSVFLFPPKPKDTLMISRTPEVTCVVVDVSHEDPEVKFNWYVDGVEVHNAKTKPREEQYNSTYRVVSVLTVLHQDWLNGKEYKCKVSNKALPAPIEKTISKAKGQPREPQVYTLPPSREEMTKNQVSLTCLVKGFYPSDIAVEWESNGQPENNYKTTPPVLDSDGSFFLYSKLTVDKSRWQQGNVFSCSVMHEALHNHYTQKSLSLSPGK

SEQ ID NO: 3 - protein, 330 aa, Homo sapiens
ASTKGPSVFPLAPSSKSTSGGTAALGCLVKDYFPEPVTVSWNSGALTSGVHTFPAVLQSSGLYSLSSVVTVPSSSLGTQTYICNVNHKPSNTKVDKKVEPKSCDKTHTCPPCPAPEAAGGPSVFLFPPKPKDTLMISRTPEVTCVVVDVSHEDPEVKFNWYVDGVEVHNAKTKPREEQYNSTYRVVSVLTVLHQDWLNGKEYKCKVSNKALPAPIEKTISKAKGQPREPQVYTLPPSREEMTKNQVSLTCLVKGFYPSDIAVEWESNGQPENNYKTTPPVLDSDGSFFLYSKLTVDKSRWQQGNVFSCSVMHEALHNHYTQKSLSLSPGK

SEQ ID NO: 4 - protein, 106 aa, Homo sapiens
TVAAPSVFIFPPSDEQLKSGTASVVCLLNNFYPREAKVQWKVDNALQSGNSQESVTEQDSKDSTYSLSSTLTLSKADYEKHKVYACEVTHQGLSSPVTKSFNRGEC

SEQ ID NO: 5 - protein, 105 aa, Homo sapiens
QPKAAPSVTLFPPSSEELQANKATLVCLISDFYPGAVTVAWKADSSPVKAGVETTTPSKQSNNKYAASSYLSLTPEQWKSHRSYSCQVTHEGSTVEKTVAPTECS

SEQ ID NO: 6 - protein, 31 aa, Homo sapiens
QVQLQESGPGLVKPSETLSLTCTVSGGSISS

SEQ ID NO: 7 - protein, 14 aa, Homo sapiens
WIRQPPGKGLEWIG

SEQ ID NO: 8 - protein, 32 aa, Homo sapiens
RVTISVDTSKNQFSLKLSSVTAADTAVYYCAR

SEQ ID NO: 9 - protein, 31 aa, Homo sapiens
EVQLVESGGGLIQPGGSLRLSCAASGFTVSS

SEQ ID NO: 10 - protein, 14 aa, Homo sapiens
WVRQAPGKGLEWVS

SEQ ID NO: 11 - protein, 32 aa, Homo sapiens
RFTISRDNSKNTLYLQMNSLRAEDTAVYYCAR

SEQ ID NO: 12 - protein, 11 aa, Homo sapiens
WGQGTLVTVSS

SEQ ID NO: 13 - protein, 11 aa, Homo sapiens
WGRGTLVTVSS

SEQ ID NO: 14 - protein, 11 aa, Homo sapiens
WGQGTTVTVSS

SEQ ID NO: 15 - protein, 23 aa, Homo sapiens
DIQMTQSPSSLSASVGDRVTITC

SEQ ID NO: 16 - protein, 15 aa, Homo sapiens
WYQQKPGKAPKLLIY

SEQ ID NO: 17 - protein, 32 aa, Homo sapiens
GVPSRFSGSGSGTDFTLTISSLQPEDFATYYC

SEQ ID NO: 18 - protein, 23 aa, Homo sapiens
EIVMTQSPATLSVSPGERATLSC

SEQ ID NO: 19 - protein, 15 aa, Homo sapiens
WYQQKPGQAPRLLIY

SEQ ID NO: 20 - protein, 32 aa, Homo sapiens
GIPARFSGSGSGTEFTLTISSLQSEDFAVYYC

SEQ ID NO: 21 - protein, 11 aa, Homo sapiens
FGQGTKLEIKR

SEQ ID NO: 22 - protein, 117 aa, Homo sapiens
EVQLVQSGAEVKKPGASVKVSCKASGYTFTSYDVNWVRQATGQGLEWMGWMNPNSGNTGYAQKFQGRVTITADESTSTAYMELSSLRSEDTAVYYCAIFDSDYMDVWGKGTLVTVSS

SEQ ID NO: 23 - protein, 108 aa, Homo sapiens
SYELTQPPSVSLSPGQTARITCSGDALPKQYAYWYQQKPGQAPVLVIYKDTERPSGIPERFSGSSSGTTVTLTISGAQAEDEADYYCQSADSSGTSWVFGGGTKLTVL

SEQ ID NO: 24 - protein, 120 aa, Homo sapiens
EVQLVQSGAEVKKPGSSAKVSCKASGGTFSSYAISWVRQAPGQGLEWMGGIIPILGTANYAQKFLGRVTITADESTSTVYMELSSLRSEDTAVYYCARGLYYDPTRADYWGQGTLVTVSS

SEQ ID NO: 25 - protein, 108 aa, Homo sapiens
DIVMTQSPDFHSVTPKEKVTITCRASQSIGSSLHWYQQKPDQSPKLLIRHASQSISGVPSRFSGSGSGTDFTLTIHSLEAEDAATYYCHQSSSSPPPTFGQGTQVEIK

SEQ ID NO: 26 - protein, 126 aa, Homo sapiens
EVQLVESGGGLVQPGGSLRLSCATSGFTFNNYWMSWVRQAPGKGLEWVANINHDESEKYYVDSAKGRFTISRDNAEKSLFLQMNSLRAEDTAVYYCARIIRGRVGFDYYNYAMDVWGQGTLVTVSS

SEQ ID NO: 27 - protein, 105 aa, Homo sapiens
DIRLTQSPSPLSASVGDRVTITCRASQSIGNYLNWYQHKPGKAPKLLIYAASSLQSGVPSRFSGTGSGTDFTLTISSLQPEDFATYYCQESYSLIFAGGTKVEIK

SEQ ID NO: 28 - protein, 124 aa, Homo sapiens
EVQLVQSGAEVKKPGASVKVSCKTSGYTFSNYDINWVRQPTGQGLEWMGWMDPNNGNTGYAQKFVGRVTMTRDTSKTTAYLELSGLKSEDTAVYYCARSSGSGGTWYKEYFQSWGQGTMVTVSS

SEQ ID NO: 29 - protein, 113 aa, Homo sapiens
DIVMTQSPLSLPVTPGEPASISCRSSQSLLHSNGYNYLDWYLQKPGQFPQLLIYLGSYRASGVPDRFSGSGSGTDFTLKISRVEAEDVGVYYCMQRIEFPPGTFGQGTKLGIK

SEQ ID NO: 30 - protein, 115 aa, Homo sapiens
EVQLVQSGAEVKKPGASVKVSCKTSGYSLTQYPIHWVRQAPGQRPEWMGWISPGNGNTKLSPKFQGRVTLSRDASAGTVFMDLSGLTSDDTAVYFCTSVDLGDHWGQGTLVTVSS

SEQ ID NO: 31 - protein, 107 aa, Homo sapiens
DIVMTQSPEFQSVTPKEKVTITCRASQSIGSSLHWYQQKPDQSPKLLINYASQSFSGVPSRFSGGGSGTDFTLTINSLEAEDAATYYCHQSSNLPITFGQGTRLEIK

SEQ ID NO: 32 - protein, 113 aa, Homo sapiens
EVQLVESGGGLVQPGRSLRLSCAASGFTFDDYPMHWVRQAPGEGLEWVSGISSNSASIGYADSVKGRFTISRDNAQNTLYLQMNSLGDEDTAVYYCVSLTLGIGQGTLVTVSS

SEQ ID NO: 33 - protein, 107 aa, Homo sapiens
DIRLTQSPSSLSASVGDRVTITCRASQSIGNYLHWYQQKPGKAPKLLIYAASSLQSGVPSRFSGSGSGTDFTLTISSLQPEDFATYYCQQSYSTLYSFGQGTKLEIK

SEQ ID NO: 34 - protein, 117 aa, Artificial Sequence
  source: /note="Description of Artificial Sequence: Synthetic polypeptide"
EVQLVESGGGLVQPGGSLRLSCAASGFTFSNYGVNWVRQAPGKGLEWVSMIAADGFTDYASSVKGRFTISRDNSKNTLYLQMNSLRAEDTAVYYCAREWHHGPVAYWGQGTLVTVSS

SEQ ID NO: 35 - protein, 117 aa, Artificial Sequence
  source: /note="Description of Artificial Sequence: Synthetic polypeptide"
EVQLVESGGGLVQPGGSLRLSCAASGFTFSNYGVSWVRQAPGKGLEWVSLIRGDGSTDYASSLKGRFTISRDNSKNTLYLQMNSLRAEDTAVYYCAREWHHGPVAYWGQGTLVTVSS

SEQ ID NO: 36 - protein, 117 aa, Artificial Sequence
  source: /note="Description of Artificial Sequence: Synthetic polypeptide"
EVQLVESGGGLVQPGGSLRLSCAASGFTFSNYGVSWVRQAPGKGLEWVSMIWADGSTHYADTLKSRFTISRDNSKNTLYLQMNSLRAEDTAVYYCAREWQHGPVAYWGQGTLVTVSS

SEQ ID NO: 37 - protein, 117 aa, Artificial Sequence
  source: /note="Description of Artificial Sequence: Synthetic polypeptide"
EVQLVESGGGLVQPGGSLRLSCAASGFTFSNYGVTWVRQAPGKGLEWVSMIWADGSTDYADTVKGRFTISRDNSKNTLYLQMNSLRAEDTAVYYCAREWQHGPVAYWGQGTLVTVSS

SEQ ID NO: 38 - protein, 117 aa, Artificial Sequence
  source: /note="Description of Artificial Sequence: Synthetic polypeptide"
EVQLVESGGGLVQPGGSLRLSCAASGFTFSNYGVTWVRQAPGKGLEWVSMIWADGSTHYADSVKSRFTISRDNSKNTLYLQMNSLRAEDTAVYYCAREWQHGPLAYWGQGTLVTVSS

SEQ ID NO: 39 - protein, 117 aa, Artificial Sequence
  source: /note="Description of Artificial Sequence: Synthetic polypeptide"
EVQLVESGGGLVQPGGSLRLSCAASGFTFSNYGVTWVRQAPGKGLEWVSMIWSDGSTDYASSVKGRFTISRDNSKNTLYLQMNSLRAEDTAVYYCAREWQHGPVAYWGQGTLVTVSS

SEQ ID NO: 40 - protein, 117 aa, Artificial Sequence
  source: /note="Description of Artificial Sequence: Synthetic polypeptide"
EVQLVESGGGLVQPGGSLRLSCAASGFTFSNYGVTWVRQAPGKGLEWVSMIWADGSTHYASSLKGRFTISRDNSKNTLYLQMNSLRAEDTAVYYCAREWQHGPAAYWGQGTLVTVSS

SEQ ID NO: 41 - protein, 117 aa, Artificial Sequence
  source: /note="Description of Artificial Sequence: Synthetic polypeptide"
EVQLVESGGGLVQPGGSLRLSCAASGFTFSNYGVSWVRQAPGKGLEWVSMIWADGSTHYASSLKGRFTISRDNSKNTLYLQMNSLRAEDTAVYYCAREWQHGPVAYWGQGTLVTVSS

SEQ ID NO: 42 - protein, 117 aa, Artificial Sequence
  source: /note="Description of Artificial Sequence: Synthetic polypeptide"
EVQLVESGGGLVQPGGSLRLSCAASGFTFSNYGVTWVRQAPGKGLEWVSMIWADGSTHYASSVKGRFTISRDNSKNTLYLQMNSLRAEDTAVYYCAREWQHGPAAYWGQGTLVTVSS

SEQ ID NO: 43 - protein, 117 aa, Artificial Sequence
  source: /note="Description of Artificial Sequence: Synthetic polypeptide"
EVQLVESGGGLVQPGGSLRLSCAASGFTFSNYGVTWVRQAPGKGLEWVSMIWADGSTHYASSVKGRFTISRDNSKNTLYLQMNSLRAEDTAVYYCAREWQHGPSAYWGQGTLVTVSS

SEQ ID NO: 44 - protein, 117 aa, Artificial Sequence
  source: /note="Description of Artificial Sequence: Synthetic polypeptide"
EVQLVESGGGLVQPGGSLRLSCAASGFTFSNYGVTWVRQAPGKGLEWVSMIWADGSTHYASSVKGRFTISRDNSKNTLYLQMNSLRAEDTAVYYCAREWQHGPVAYWGQGTLVTVSS

SEQ ID NO: 45 - protein, 117 aa, Artificial Sequence
  source: /note="Description of Artificial Sequence: Synthetic polypeptide"
EVQLVESGGGLVQPGGSLRLSCAASGFTFSNYGVEWVRQAPGKGLEWVSGIWADGSTHYADTVKSRFTISRDNSKNTLYLQMNSLRAEDTAVYYCAREWQHGPVAYWGQGTLVTVSS

SEQ ID NO: 46 - protein, 117 aa, Artificial Sequence
  source: /note="Description of Artificial Sequence: Synthetic polypeptide"
EVQLVESGGGLVQPGGSLRLSCAASGFTFSNYGVEWVRQAPGKGLEWVSGIWADGSTHYADTVKSRFTISRDNSKNTLYLQMNSLRAEDTAVYYCAREWQHGPVGYWGQGTLVTVSS

SEQ ID NO: 47 - protein, 117 aa, Artificial Sequence; identical to SEQ ID NO: 46
  source: /note="Description of Artificial Sequence: Synthetic polypeptide"

SEQ ID NO: 48 - protein, 117 aa, Artificial Sequence
  source: /note="Description of Artificial Sequence: Synthetic polypeptide"
EVQLVESGGGLVQPGGSLRLSCAASGFTFSNYGVTWVRQAPGKGLEWVSMIWADGSTDYASTVKGRFTISRDNSKNTLYLQMNSLRAEDTAVYYCAREWQHGPVGYWGQGTLVTVSS

SEQ ID NO: 49 - protein, 117 aa, Artificial Sequence; identical to SEQ ID NO: 44
  source: /note="Description of Artificial Sequence: Synthetic polypeptide"

SEQ ID NO: 50 - protein, 117 aa, Artificial Sequence; identical to SEQ ID NO: 38
  source: /note="Description of Artificial Sequence: Synthetic polypeptide"

SEQ ID NO: 51 - protein, 117 aa, Artificial Sequence
  source: /note="Description of Artificial Sequence: Synthetic polypeptide"
EVQLVESGGGLVQPGGSLRLSCAASGFTFSNYGVQWVRQAPGKGLEWVSGIGADGSTAYASSLKGRFTISRDNSKNTLYLQMNSLRAEDTAVYYCAREWQHSGLAYWGQGTLVTVSS

SEQ ID NO: 52 - protein, 117 aa, Artificial Sequence
  source: /note="Description of Artificial Sequence: Synthetic polypeptide"
EVQLVESGGGLVQPGGSLRLSCAASGFTFSNYGVSWVRQAPGKGLEWVSMIWADGSTHYADTVKGRFTISRDNSKNTLYLQMNSLRAEDTAVYYCAREWQHGPLAYWGQGTLVTVSS

SEQ ID NO: 53 - protein, 117 aa, Artificial Sequence
  source: /note="Description of Artificial Sequence: Synthetic polypeptide"
EVQLVESGGGLVQPGGSLRLSCAASGFTFSNYGVTWVRQAPGKGLEWVSMIWADGSTHYADTVKGRFTISRDNSKNTLYLQMNSLRAEDTAVYYCAREWQHGPLAYWGQGTLVTVSS

SEQ ID NO: 54 - protein, 117 aa, Artificial Sequence; identical to SEQ ID NO: 44
  source: /note="Description of Artificial Sequence: Synthetic polypeptide"

SEQ ID NO: 55 - protein, 117 aa, Artificial Sequence; identical to SEQ ID NO: 44
  source: /note="Description of Artificial Sequence: Synthetic polypeptide"

SEQ ID NO: 56 - protein, 117 aa, Artificial Sequence; identical to SEQ ID NO: 44
  source: /note="Description of Artificial Sequence: Synthetic polypeptide"

SEQ ID NO: 57 - protein, 117 aa, Artificial Sequence; identical to SEQ ID NO: 44
  source: /note="Description of Artificial Sequence: Synthetic polypeptide"

SEQ ID NO: 58 - protein, 117 aa, Artificial Sequence; identical to SEQ ID NO: 44
  source: /note="Description of Artificial Sequence: Synthetic polypeptide"

SEQ ID NO: 59 - protein, 108 aa, Artificial Sequence
  source: /note="Description of Artificial Sequence: Synthetic polypeptide"
DIQMTQSPSSLSASVGDRVTITCKASQAVSSAVAWYQQKPGKAPKLLIYWASTRHTGVPSRFSGSGSGTDFTLTISSLQPEDFATYYCQQHYSTPFTFGQGTKLEIKR

SEQ ID NO: 60 - protein, 108 aa, Artificial Sequence
  source: /note="Description of Artificial Sequence: Synthetic polypeptide"
DIQMTQSPSSLSASVGDRVTITCRASQLVSSAVAWYQQKPGKAPKLLIYWASTLHTGVPSRFSGSGSGTDFTLTISSLQPEDFATYYCQQHYRTPFTFGQGTKLEIKR

SEQ ID NO: 61 - protein, 108 aa, Artificial Sequence
  source: /note="Description of Artificial Sequence: Synthetic polypeptide"
DIQMTQSPSSLSASVGDRVTITCRASQLVSSAVAWYQQKPGKAPKLLIYWASTRHSGVPSRFSGSGSGTDFTLTISSLQPEDFATYYCQQHYRTPFSFGQGTKLEIKR

SEQ ID NO: 62 - protein, 108 aa, Artificial Sequence
  source: /note="Description of Artificial Sequence: Synthetic polypeptide"
DIQMTQSPSSLSASVGDRVTITCRASQLVSSAVAWYQQKPGKAPKLLIYWASTRHSGVPSRFSGSGSGTDFTLTISSLQPEDFATYYCQQHYRTPFTFGQGTKLEIKR

SEQ ID NO: 63 - protein, 108 aa, Artificial Sequence
  source: /note="Description of Artificial Sequence: Synthetic polypeptide"
DIQMTQSPSSLSASVGDRVTITCRASQLVSSAVAWYQQKPGKAPKLLIYWASARHTGVPSRFSGSGSGTDFTLTISSLQPEDFATYYCQQHYKTPFSFGQGTKLEIKR

SEQ ID NO: 64 - protein, 108 aa, Artificial Sequence
  source: /note="Description of Artificial Sequence: Synthetic polypeptide"
DIQMTQSPSSLSASVGDRVTITCRASQLVSSAVAWYQQKPGKAPKLLIYWASARHTGVPSRFSGSGSGTDFTLTISSLQPEDFATYYCQQHYKTPFTFGQGTKLEIKR

SEQ ID NO: 65 - protein, 108 aa, Artificial Sequence
  source: /note="Description of Artificial Sequence: Synthetic polypeptide"
DIQMTQSPSSLSASVGDRVTITCRASQLVSSAVAWYQQKPGKAPKLLIYWASARHTGVPSRFSGSGSGTDFTLTISSLQPEDFATYYCQQHYRTPFTFGQGTKLEIKR

SEQ ID NO: 66 - protein, 108 aa, Artificial Sequence
  source: /note="Description of Artificial Sequence: Synthetic polypeptide"
DIQMTQSPSSLSASVGDRVTITCRASQLVSSAVAWYQQKPGKAPKLLIYWASTRHTGVPSRFSGSGSGTDFTLTISSLQPEDFATYYCQQHYRTPFTFGQGTKLEIKR

SEQ ID NO: 67 - protein, 108 aa, Artificial Sequence
  source: /note="Description of Artificial Sequence: Synthetic polypeptide"
DIQMTQSPSSLSASVGDRVTITCRASQGVSSALAWYQQKPGKAPKLLIYWASALHSGVPSRFSGSGSGTDFTLTISSLQPEDFATYYCQQHYSAPFTFGQGTKLEIKR

SEQ ID NO: 68 - protein, 108 aa, Artificial Sequence
  source: /note="Description of Artificial Sequence: Synthetic polypeptide"
DIQMTQSPSSLSASVGDRVTITCRASQLVSSAVAWYQQKPGKAPKLLIYWASTLHSGVPSRFSGSGSGTDFTLTISSLQPEDFATYYCQQHYSTPFTFGQGTKLEIKR

SEQ ID NO: 69 - protein, 108 aa, Artificial Sequence
  source: /note="Description of Artificial Sequence: Synthetic polypeptide"
DIQMTQSPSSLSASVGDRVTITCKASQLVSSAVAWYQQKPGKAPKLLIYWASTRHTGVPSRFSGSGSGTDFTLTISSLQPEDFATYYCQQHYSTPFTFGQGTKLEIKR

SEQ ID NO: 70 - protein, 108 aa, Artificial Sequence
  source: /note="Description of Artificial Sequence: Synthetic polypeptide"
DIQMTQSPSSLSASVGDRVTITCKASQLVSSAVAWYQQKPGKAPKLLIYWASTLHTGVPSRFSGSGSGTDFTLTISSLQPEDFATYYCQQHYRTPFTFGQGTKLEIKR

SEQ ID NO: 71 - protein, 108 aa, Artificial Sequence
  source: /note="Description of Artificial Sequence: Synthetic polypeptide"
DIQMTQSPSSLSASVGDRVTITCKASQKVSSALAWYQQKPGKAPKLLIYWASALHSGVPSRFSGSGSGTDFTLTISSLQPEDFATYYCQQHYRPPFTFGQGTKLEIKR

SEQ ID NO: 72 - protein, 108 aa, Artificial Sequence
  source: /note="Description of Artificial Sequence: Synthetic polypeptide"
DIQMTQSPSSLSASVGDRVTITCKASQLVSSAVAWYQQKPGKAPKLLIYWASALHTGVPSRFSGSGSGTDFTLTISSLQPEDFATYYCQQHYSSPYTFGQGTKLEIKR

SEQ ID NO: 73 - protein, 108 aa, Artificial Sequence; identical to SEQ ID NO: 70
  source: /note="Description of Artificial Sequence: Synthetic polypeptide"

SEQ ID NO: 74 - protein, 124 aa, Artificial Sequence
  source: /note="Description of Artificial Sequence: Synthetic polypeptide"
EVQLVQSGAEVKKPGASVKVSCKASGYTFANYGIIWVRQAPGQGLEWMGWINTYTGKPTYAQKFQGRVTMTTDTSTSTAYMELSSLRSEDTAVYYCARKLFTTMDVTDNAMDYWGQGTTVTVSS

SEQ ID NO: 75 - protein, 124 aa, Artificial Sequence
  source: /note="Description of Artificial Sequence: Synthetic polypeptide"
EVQLVQSGAEVKKPGASVKVSCKASGYTFNNYGIIWVRQAPGQGLEWMGWINTYTGKPTYAQKLQGRVTMTTDTSTSTAYMELSSLRSEDTAVYFCARKLFNTVDVTDNAMDYWGQGTTVTVSS

SEQ ID NO: 76 - protein, 124 aa, Artificial Sequence
  source: /note="Description of Artificial Sequence: Synthetic polypeptide"
EVQLVQSGAEVKKPGASVKVSCKASGYTFNNYGIIWVRQAPGQGLEWMGWINTYTGVPTYAQKFQGRVTMTTDTSTSTAYMELSSLRSEDTAVYYCARKLFNTVDVTDNAMDYWGQGTTVTVSS

SEQ ID NO: 77 - protein, 124 aa, Artificial Sequence
  source: /note="Description of Artificial Sequence: Synthetic polypeptide"
EVQLVQSGAEVKKPGASVKVSCKASGYTFNNYGIIWVRQAPGQGLEWMGWINTYTGKPTYAQKFQGRVTMTTDTSTSTAYMELSSLRSEDTAVYYCARKLFNTVAVTDNAMDYWGQGTTVTVSS

SEQ ID NO: 78 - protein, 124 aa, Artificial Sequence
  source: /note="Description of Artificial Sequence: Synthetic polypeptide"
EVQLVQSGAEVKKPGASVKVSCKASGYTFRNYGIIWVRQAPGQGLEWMGWINTYTGKPTYAQKFQGRVTMTTDTSTSTAYMELSSLRSEDTAVYFCARKLFTTVDVTDNAMDYWGQGTTVTVSS

SEQ ID NO: 79 - protein, 124 aa, Artificial Sequence
  source: /note="Description of Artificial Sequence: Synthetic polypeptide"
EVQLVQSGAEVKKPGASVKVSCKASGYTFNNYGINWVRQAPGQGLEWMGWINTYTGKPTYAQKFQGRVTMTTDTSTSTAYMELSSLRSEDTAVYFCARKFRNTVAVTDYAMDYWGQGTTVTVSS

SEQ ID NO: 80 - protein, 124 aa, Artificial Sequence
  source: /note="Description of Artificial Sequence: Synthetic polypeptide"
EVQLVQSGAEVKKPGASVKVSCKASGYTFRNYGITWVRQAPGQGLEWMGWINTYTGKPTYAQKFQGRVTMTTDTSTSTAYMELSSLRSEDTAVYFCARKLFTTMDVTDNAMDYWGQGTTVTVSS

SEQ ID NO: 81 - protein, 124 aa, Artificial Sequence; identical to SEQ ID NO: 74
  source: /note="Description of Artificial Sequence: Synthetic polypeptide"

SEQ ID NO: 82 - protein, 124 aa, Artificial Sequence
  source: /note="Description of Artificial Sequence: Synthetic polypeptide"
EVQLVQSGAEVKKPGASVKVSCKASGYTFSNYGINWVRQAPGQGLEWMGWINTYTGQPSYAQKFQGRVTMTTDTSTSTAYMELSSLRSEDTAVYYCARKLFKTEAVTDYAMDYWGQGTTVTVSS

SEQ ID NO: 83 - protein, 124 aa, Artificial Sequence
  source: /note="Description of Artificial Sequence: Synthetic polypeptide"
EVQLVQSGAEVKKPGASVKVSCKASGYTFNNYGIIWVRQAPGQGLEWMGWINTYSGKPTYAQKFQGRVTMTTDTSTSTAYMELSSLRSEDTAVYFCARKLFTTMDVTDNAMDYWGQGTTVTVSS

SEQ ID NO: 84 - protein, 107 aa, Artificial Sequence
  source: /note="Description of Artificial Sequence: Synthetic polypeptide"
DIQMTQSPSSLSASVGDRVTITCRASQDISQYLNWYQQKPGKAPKLLIYYTSRLQSGVPSRFSGSGSGTDFTLTISSLQPEDFATYFCQQGNTWPPTFGQGTKLEIK

SEQ ID NO: 85 - protein, 107 aa, Artificial Sequence
  source: /note="Description of Artificial Sequence: Synthetic polypeptide"
DIQMTQSPSSLSASVGDRVTITCRASQDISNYLNWYQQKPGKAPKLLIYYTSRLQSGVPSRFSGSGSGTDYTLTISSLQPEDFATYFCQQGNSWPPTFGQGTKLEIK

SEQ ID NO: 86 - protein, 107 aa, Artificial Sequence
  source: /note="Description of Artificial Sequence: Synthetic polypeptide"
DIQMTQSPSSLSASVGDRVTITCRASQDIYNYLNWYQQKPGKAPKLLIYYTSRLQSGVPSRFSGSGSGTDYTLTISSLQPEDFATYFCQQGNTQPPTFGQGTKLEIK

SEQ ID NO: 87 - protein, 107 aa, Artificial Sequence
  source: /note="Description of Artificial Sequence: Synthetic polypeptide"
DIQMTQSPSSLSASVGDRVTITCRASQDIENYLNWYQQKPGKAPKLLIYYTSRLQSGVPSRFSGSGSGTDFTLTISSLQPEDFATYFCQQGNTQPPTFGQGTKLEIK

SEQ ID NO: 88 - protein, 107 aa, Artificial Sequence
  source: /note="Description of Artificial Sequence: Synthetic polypeptide"
DIQMTQSPSSLSASVGDRVTITCRASQDISNYLNWYQQKPGKAPKLLIYYTSRLQSGVPSRFSGSGSGTDYTLTISSLQPEDFATYFCQQGNTWPPTFGQGTKLEIK

SEQ ID NO: 89 - protein, 107 aa, Artificial Sequence
  source: /note="Description of Artificial Sequence: Synthetic polypeptide"
DIQMTQSPSSLSASVGDRVTITCRASQDIYDVLNWYQQKPGKAPKLLIYYASRLQSGVPSRFSGSGSGTDFTLTISSLQPEDFATYYCQQGITLPPTFGQGTKLEIK

SEQ ID NO: 90 - protein, 107 aa, Artificial Sequence; identical to SEQ ID NO: 88
  source: /note="Description of Artificial Sequence: Synthetic polypeptide"

SEQ ID NO: 91 - protein, 107 aa, Artificial Sequence; identical to SEQ ID NO: 84
  source: /note="Description of Artificial Sequence: Synthetic polypeptide"

SEQ ID NO: 92 - protein, 107 aa, Artificial Sequence
  source: /note="Description of Artificial Sequence: Synthetic polypeptide"
DIQMTQSPSSLSASVGDRVTITCRASQNIYNVLNWYQQKPGKAPKLLIYYASRLQSGVPSRFSGSGSGTDFTLTISSLQPEDFATYFCQQGNTMPPTFGQGTKLEIK

SEQ ID NO: 93 - protein, 107 aa, Artificial Sequence
  source: /note="Description of Artificial Sequence: Synthetic polypeptide"
DIQMTQSPSSLSASVGDRVTITCRASQDISNFLNWYQQKPGKAPKLLIYYTSRLQSGVPSRFSGSGSGTDYTLTISSLQPEDFATYFCQQGNTQPPTFGQGTKLEIK

SEQ ID NO: 94 - protein, 120 aa, Artificial Sequence
  source: /note="Description of Artificial Sequence: Synthetic polypeptide"
EVQLVQSGAEVKKPGSSVKVSCKASGGTFSWYAISWVRQAPGQGLEWMGGITPILGSANYAQKFQGRVTITADESTSTAYMELSSLRSEDTAVYYCARGLYYDPTRADYWGQGTLVTVSS

SEQ ID NO: 95 - protein, 120 aa, Artificial Sequence
  source: /note="Description of Artificial Sequence: Synthetic polypeptide"
EVQLVQSGAEVKKPGSSVKVSCKASGGTFSYYSISWVRQAPGQGLEWMGGIMPILGTANYAQKFQGRVTITADESTSTAYMELSSLRSEDTAVYYCARGLYYDPTRADYWGQGTLVTVSS

SEQ ID NO: 96 - protein, 120 aa, Artificial Sequence
  source: /note="Description of Artificial Sequence: Synthetic polypeptide"
EVQLVQSGAEVKKPGSSVKVSCKASGGTFSWYAISWVRQAPGQGLEWMGGIIPILGSPIYAQKFQGRVTITADESTSTAYMELSSLRSEDTAVYYCARGLYYDPTRADYWGQGTLVTVSS

SEQ ID NO: 97 - protein, 120 aa, Artificial Sequence
  source: /note="Description of Artificial Sequence: Synthetic polypeptide"
EVQLVQSGAEVKKPGSSVKVSCKASGGTFSWYTISWVRQAPGQGLEWMGGIIPILGSPIYAQKFQGRVTITADESTSTAYMELSSLRSEDTAVYYCARGLYYDPTRADYWGQGTLVTVSS

SEQ ID NO: 98 - protein, 120 aa, Artificial Sequence
  source: /note="Description of Artificial Sequence: Synthetic polypeptide"
EVQLVQSGAEVKKPGSSVKVSCKASGGTFAWYSISWVRQAPGQGLEWMGGITPILGTANYAQKFQGRVTITADESTSTAYMELSSLRSEDTAVYYCARGLYYDPTRADYWGQGTLVTVSS

SEQ ID NO: 99 - protein, 120 aa, Artificial Sequence
  source: /note="Description of Artificial Sequence: Synthetic polypeptide"
EVQLVQSGAEVKKPGSSVKVSCKASGGTFSFYAISWVRQAPGQGLEWMGGITPILGAATYAQKFQGRVTITADESTSTAYMELSSLRSEDTAVYYCARGLYYDPTRADYWGQGTLVTVSS

SEQ ID NO: 100 - protein, 120 aa, Artificial Sequence
  source: /note="Description of Artificial Sequence: Synthetic polypeptide"
EVQLVQSGAEVKKPGSSVKVSCKASGGTFSIYAISWVRQAPGQGLEWMGGITPILGAAVYAQKFQGRVTITADESTSTAYMELSSLRSEDTAVYYCARGLYYDPTRADYWGQGTLVTVSS

SEQ ID NO: 101 - protein, 120 aa, Artificial Sequence
  source: /note="Description of Artificial Sequence: Synthetic polypeptide"
EVQLVQSGAEVKKPGSSVKVSCKASGGTFSWYTISWVRQAPGQGLEWMGGIMPILGTANYAQKFQGRVTITADESTSTAYMELSSLRSEDTAVYYCARGLYYDPTRADYWGQGTLVTVSS

SEQ ID NO: 102 - protein, 120 aa, Artificial Sequence
  source: /note="Description of Artificial Sequence: Synthetic polypeptide"
EVQLVQSGAEVKKPGSSVKVSCKASGGTFSWYAISWVRQAPGQGLEWMGGITPILGVAVYAQKFQGRVTITADESTSTAYMELSSLRSEDTAVYYCARGLYYDPTRADYWGQGTLVTVSS

SEQ ID NO: 103 - protein, 120 aa, Artificial Sequence
  source: /note="Description of Artificial Sequence: Synthetic polypeptide"
EVQLVQSGAEVKKPGSSVKVSCKASGGTFSWYAISWVRQAPGQGLEWMGGITPILGTANYAQKFQGRVTITADESTSTAYMELSSLRSEDTAVYYCARGLYYDPTRADYWGQGTLVTVSS

SEQ ID NO: 104 - protein, 120 aa, Artificial Sequence
  source: /note="Description of Artificial Sequence: Synthetic polypeptide"
EVQLVQSGAEVKKPGSSVKVSCKASGGTFSWYAISWVRQAPGQGLEWMGGITPILGSAHYAQKFQGRVTITADESTSTAYMELSSLRSEDTAVYYCARGLYYDPTRADYWGQGTLVTVSS

SEQ ID NO: 105 - protein, 120 aa, Artificial Sequence
  source: /note="Description of Artificial Sequence: Synthetic polypeptide"
EVQLVQSGAEVKKPGSSVKVSCKASGGTFSWYAISWVRQAPGQGLEWMGGITPILGSAIYAQKFQGRVTITADESTSTVYMELSSLRSEDTAVYYCARGLYYDPTRADYWGQGTLVTVSS

SEQ ID NO: 106 - protein, 120 aa, Artificial Sequence
  source: /note="Description of Artificial Sequence: Synthetic polypeptide"
EVQLVQSGAEVKKPGSSVKVSCKASGGTFSWYAISWVRQAPGQGLEWMGGITPILGTAIYAQKFQGRVTITADESTSTVYMELSSLRSEDTAVYYCARGLYYDPTRADYWGQGTLVTVSS

SEQ ID NO: 107 - protein, 120 aa, Artificial Sequence
  source: /note="Description of Artificial Sequence: Synthetic polypeptide"
EVQLVQSGAEVKKPGSSVKVSCKASGGTFSIYTISWVRQAPGQGLEWMGGIIPILRNPIYAQKFQGRVTITADESTSTAYMELSSLRSEDTAVYYCARGLYYDPTRADYWGQGTLVTVSS

SEQ ID NO: 108 - protein, 120 aa, Artificial Sequence
  source: /note="Description of Artificial Sequence: Synthetic polypeptide"
EVQLVQSGAEVKKPGSSVKVSCKASGGTFSYYAISWVRQAPGQGLEWMGGIMPILGTPTYAQKFQGRVTITADESTSTAYMELSSLRSEDTAVYYCARGLYYDPTRADYWGQGTLVTVSS

SEQ ID NO: 109 - protein, 120 aa, Artificial Sequence
  source: /note="Description of Artificial Sequence: Synthetic polypeptide"
EVQLVQSGAEVKKPGSSVKVSCKASGGTFSIYTISWVRQAPGQGLEWMGGIIPILGAPIYAQKFQGRVTITADESTSTAYMELSSLRSEDTAVYYCARGLYYDPTRADYWGQGTLVTVSS

SEQ ID NO: 110 - protein, 120 aa, Artificial Sequence
  source: /note="Description of Artificial Sequence: Synthetic polypeptide"
EVQLVQSGAEVKKPGSSVKVSCKASGGTFSWYAISWVRQAPGQGLEWMGGITPILGSATYAQKFQGRVTITADESTSTAYMELSSLRSEDTAVYYCARGLYYDPTRADYWGQGTLVTVSS

SEQ ID NO: 111 - protein, 120 aa, Artificial Sequence
  source: /note="Description of Artificial Sequence: Synthetic polypeptide"
EVQLVQSGAEVKKPGSSVKVSCKASGGTFSWYSISWVRQAPGQGLEWMGGIMPILGSASYAQKFQGRVTITADESTSTAYMELSSLRSEDTAVYYCARGLYYDPTRADYWGQGTLVTVSS

SEQ ID NO: 112 - protein, 120 aa, Artificial Sequence
  source: /note="Description of Artificial Sequence: Synthetic polypeptide"
EVQLVQSGAEVKKPGSSVKVSCKASGGTFSWYTISWVRQAPGQGLEWMGGIMPILGTASYAQKFQGRVTITADESTSTAYMELSSLRSEDTAVYYCARGLYYDPTRADYWGQGTLVTVSS

SEQ ID NO: 113 - protein, 120 aa, Artificial Sequence
  source: /note="Description of Artificial Sequence: Synthetic polypeptide"
EVQLVQSGAEVKKPGSSVKVSCKASGGTFSWYSISWVRQAPGQGLEWMGGITPILGTANYAQKFQGRVTITADESTSTAYMELSSLRSEDTAVYYCARGLYYDPTRADYWGQGTLVTVSS

SEQ ID NO: 114 - protein, 120 aa, Artificial Sequence
  source: /note="Description of Artificial Sequence: Synthetic polypeptide"
EVQLVQSGAEVKKPGSSVKVSCKASGGTFSWYAISWVRQAPGQGLEWMGGIMPILGTATYAQKFQGRVTITADESTSTAYMELSSLRSEDTAVYYCARGLYYDPTRADYWGQGTLVTVSS

SEQ ID NO: 115 - protein, 120 aa, Artificial Sequence
  source: /note="Description of Artificial Sequence: Synthetic polypeptide"
EVQLVQSGAEVKKPGSSVKVSCKASGGTFSFYTISWVRQAPGQGLEWMGGIMPILGSPHYAQKFQGRVTITADESTSTAYMELSSLRSEDTAVYYCARGLYYDPTRADYWGQGTLVTVSS

SEQ ID NO: 116 - protein, 120 aa, Artificial Sequence
  source: /note="Description of Artificial Sequence: Synthetic polypeptide"
EVQLVQSGAEVKKPGSSVKVSCKASGGTFSWYAISWVRQAPGQGLEWMGGITPILGTANYAQKFQGRVTITADESTSTVYMELSSLRSEDTAVYYCARGLYYDPTRADYWGQGTLVTVSS

SEQ ID NO: 117 - protein, 120 aa, Artificial Sequence
  source: /note="Description of Artificial Sequence: Synthetic polypeptide"
EVQLVQSGAEVKKPGSSVKVSCKASGGTFSWYAISWVRQAPGQGLEWMGGIMPILGSATYAQKFQGRVTITADESTSTAYMELSSLRSEDTAVYYCARGLYYDPTRADYWGQGTLVTVSS

SEQ ID NO: 118 - protein, 120 aa, Artificial Sequence
  source: /note="Description of Artificial Sequence: Synthetic polypeptide"
EVQLVQSGAEVKKPGSSVKVSCKASGGTFSWYAISWVRQAPGQGLEWMGGIIPILGTPTYAQKFQGRVTITADESTSTAYMELSSLRSEDTAVYYCARGLYYDPTRADYWGQGTLVTVSS

SEQ ID NO: 119 - protein, 120 aa, Artificial Sequence
  source: /note="Description of Artificial Sequence: Synthetic polypeptide"
EVQLVQSGAEVKKPGSSVKVSCKASGGTFSSYAISWVRQAPGQGLEWMGGIIPILGTANYAQKFQGRVTITADESTSTVYMELSSLRSEDTAVYYCARGVYYDPKRADYWGQGTLVTVSS

SEQ ID NO: 120 - protein, 120 aa, Artificial Sequence
  source: /note="Description of Artificial Sequence: Synthetic polypeptide"
EVQLVQSGAEVKKPGSSVKVSCKASGGTFSLYTISWVRQAPGQGLEWMGGIMPILGAPRYAQKFQGRVTITADESTSTAYMELSSLRSEDTAVYYCARGLYYDPTRADYWGQGTLVTVSS

SEQ ID NO: 121 - protein, 120 aa, Artificial Sequence
  source: /note="Description of Artificial Sequence: Synthetic polypeptide"
EVQLVQSGAEVKKPGSSVKVSCKASGGTFSYYAISWVRQAPGQGLEWMGGIMPILGSPIYAQKFQGRVTITADESTSTVYMELSSLRSEDTAVYYCARGLYYDPTRADYWGQGTLVTVSS

SEQ ID NO: 122 - protein, 120 aa, Artificial Sequence
  source: /note="Description of Artificial Sequence: Synthetic polypeptide"
EVQLVQSGAEVKKPGSSVKVSCKASGGTFSIYAISWVRQAPGQGLEWMGGILPILGSPIYAQKFQGRVTITADESTSTAYMELSSLRSEDTAVYYCARGLYYDPTRADYWGQGTLVTVSS

SEQ ID NO: 123 - protein, 120 aa, Artificial Sequence
  source: /note="Description of Artificial Sequence: Synthetic polypeptide"
EVQLVQSGAEVKKPGSSVKVSCKASGGTFSIYAISWVRQAPGQGLEWMGGIIPILGSPIYAQKFQGRVTITADESTSTAYMELSSLRSEDTAVYYCARGLYYDPTRADYWGQGTLVTVSS

SEQ ID NO: 124 - protein, 120 aa, Artificial Sequence
  source: /note="Description of Artificial Sequence: Synthetic polypeptide"
EVQLVQSGAEVKKPGSSVKVSCKASGGTFSWYAISWVRQAPGQGLEWMGGIVPILGAPLYAQKFQGRVTITADESTSTAYMELSSLRSEDTAVYYCARGLYYDPTRADYWGQGTLVTVSS

SEQ ID NO: 125 - protein, 120 aa, Artificial Sequence
  source: /note="Description of Artificial Sequence: Synthetic polypeptide"
EVQLVQSGAEVKKPGSSVKVSCKASGGTFSIYAISWVRQAPGQGLEWMGGIMPILGAPIYAQKFQGRVTITADESTSTAYMELSSLRSEDTAVYYCARGLYYDPTRADYWGQGTLVTVSS

SEQ ID NO: 126 - protein, 120 aa, Artificial Sequence
  source: /note="Description of Artificial Sequence: Synthetic polypeptide"
EVQLVQSGAEVKKPGSSVKVSCKASGGTFSYYTISWVRQAPGQGLEWMGGIMPILGTPAYAQKFQGRVTITADESTSTAYMELSSLRSEDTAVYYCARGLYYDPTRADYWGQGTLVTVSS

SEQ ID NO: 127 - protein, 120 aa, Artificial Sequence
  source: /note="Description of Artificial Sequence: Synthetic polypeptide"
EVQLVQSGAEVKKPGSSVKVSCKASGGTFSWYSISWVRQAPGQGLEWMGGITPILGAATYAQKFQGRVTITADESTSTAYMELSSLRSEDTAVYYCARGLYYDPTRADYWGQGTLVTVSS

SEQ ID NO: 128 - protein, 120 aa, Artificial Sequence
  source: /note="Description of Artificial Sequence: Synthetic polypeptide"
EVQLVQSGAEVKKPGSSVKVSCKASGGTFSWYAISWVRQAPGQGLEWMGGIIPILGTPTYAQKFQGRVTITADESTSTVYMELSSLRSEDTAVYYCARGLYYDPTRADYWGQGTLVTVSS

SEQ ID NO: 129 - protein, 120 aa, Artificial Sequence
  source: /note="Description of Artificial Sequence: Synthetic polypeptide"
EVQLVQSGAEVKKPGSSVKVSCKASGGTFSWYAISWVRQAPGQGLEWMGGIIPILGTPIYAQKFQGRVTITADESTSTAYMELSSLRSEDTAVYYCARGLYYDPTRADYWGQGTLVTVSS

SEQ ID NO: 130 - protein, 120 aa, Artificial Sequence
  source: /note="Description of Artificial Sequence: Synthetic polypeptide"
EVQLVQSGAEVKKPGSSVKVSCKASGGTFSWYAISWVRQAPGQGLEWMGGITPILGIGNYAQKFQGRVTITADESTSTAYMELSSLRSEDTAVYYCARGLYYDPTRADYWGQGTLVTVSS

SEQ ID NO: 131 - protein, 120 aa, Artificial Sequence
  source: /note="Description of Artificial Sequence: Synthetic polypeptide"
EVQLVQSGAEVKKPGSSVKVSCKASGGTFSIYAISWVRQAPGQGLEWMGGIVPILGAATYAQKFQGRVTITADESTSTAYMELSSLRSEDTAVYYCARGLYYDPTRADYWGQGTLVTVSS

SEQ ID NO: 132 - protein, 120 aa, Artificial Sequence
  source: /note="Description of Artificial Sequence: Synthetic polypeptide"
EVQLVQSGAEVKKPGSSVKVSCKASGGTFSWYAISWVRQAPGQGLEWMGGITPILGSSTYAQKFQGRVTITADESTSTAYMELSSLRSEDTAVYYCARGLYYDPTRADYWGQGTLVTVSS

SEQ ID NO: 133 - protein, 120 aa, Artificial Sequence; identical to SEQ ID NO: 101
  source: /note="Description of Artificial Sequence: Synthetic polypeptide"

SEQ ID NO: 134 - protein, 120 aa, Artificial Sequence
  source: /note="Description of Artificial Sequence: Synthetic polypeptide"
EVQLVQSGAEVKKPGSSVKVSCKASGGTFSWYAISWVRQAPGQGLEWMGGITPILGNSIYAQKFQGRVTITADESTSTAYMELSSLRSEDTAVYYCARGLYYDPTRADYWGQGTLVTVSS

SEQ ID NO: 135 - protein, 120 aa, Artificial Sequence
  source: /note="Description of Artificial Sequence: Synthetic polypeptide"
EVQLVQSGAEVKKPGSSVKVSCKASGGTFSWYAISWVRQAPGQGLEWMGGITPILGSPIYAQKFQGRVTITADESTSTAYMELSSLRSEDTAVYYCARGLYYDPTRADYWGQGTLVTVSS

SEQ ID NO: 136 - protein, 120 aa, Artificial Sequence
  source: /note="Description of Artificial Sequence: Synthetic polypeptide"
EVQLVQSGAEVKKPGSSVKVSCKASGGTFSWYAISWVRQAPGQGLEWMGGIMPILGTPTYAQKFQGRVTITADESTSTAYMELSSLRSEDTAVYYCARGLYYDPTRADYWGQGTLVTVSS

SEQ ID NO: 137 - protein, 120 aa, Artificial Sequence
  source: /note="Description of Artificial Sequence: Synthetic polypeptide"
EVQLVQSGAEVKKPGSSVKVSCKASGGTFSYYAISWVRQAPGQGLEWMGGITPILGAANYAQKFQGRVTITADESTSTVYMELSSLRSEDTAVYYCARGLYYDPTRADYWGQGTLVTVSS

SEQ ID NO: 138 - protein, 120 aa, Artificial Sequence
  source: /note="Description of Artificial Sequence: Synthetic polypeptide"
EVQLVQSGAEVKKPGSSVKVSCKASGGTFSWYAISWVRQAPGQGLEWMGGITPILGAAIYAQKFQGRVTITADESTSTAYMELSSLRSEDTAVYYCARGLYYDPTRADYWGQGTLVTVSS

SEQ ID NO: 139 - protein, 120 aa, Artificial Sequence
  source: /note="Description of Artificial Sequence: Synthetic polypeptide"
EVQLVQSGAEVKKPGSSVKVSCKASGGTFSWYAISWVRQAPGQGLEWMGGITPILGTATYAQKFQGRVTITADESTSTAYMELSSLRSEDTAVYYCARGLYYDPTRADYWGQGTLVTVSS

SEQ ID NO: 140 - protein, 120 aa, Artificial Sequence
  source: /note="Description of Artificial Sequence: Synthetic polypeptide"
EVQLVQSGAEVKKPGSSVKVSCKASGGTFSWYSISWVRQAPGQGLEWMGGITPILGSAHYAQKFQGRVTITADESTSTAYMELSSLRSEDTAVYYCARGLYYDPTRADYWGQGTLVTVSS

SEQ ID NO: 141 - protein, 120 aa, Artificial Sequence
  source: /note="Description of Artificial Sequence: Synthetic polypeptide"
EVQLVQSGAEVKKPGSSVKVSCKASGGTFSWYAISWVRQAPGQGLEWMGGITPILGNAIYAQKFQGRVTITADESTSTAYMELSSLRSEDTAVYYCARGLYYDPTRADYWGQGTLVTVSS

SEQ ID NO: 142 - protein, 120 aa, Artificial Sequence
  source: /note="Description of Artificial Sequence: Synthetic polypeptide"
EVQLVQSGAEVKKPGSSVKVSCKASGGTFSWYAISWVRQAPGQGLEWMGGITPILRSAVYAQKFQGRVTITADESTSTVYMELSSLRSEDTAVYYCARGLYYDPTRADYWGQGTLVTVSS

SEQ ID NO: 143 - protein, 120 aa, Artificial Sequence
  source: /note="Description of Artificial Sequence: Synthetic polypeptide"
EVQLVQSGAEVKKPGSSVKVSCKASGGTFSWYSISWVRQAPGQGLEWMGGIMPILGTANYAQKFQGRVTITADESTSTAYMELSSLRSEDTAVYYCARGLYYDPTRADYWGQGTLVTVSS

SEQ ID NO: 144 - protein, 120 aa, Artificial Sequence
  source: /note="Description of Artificial Sequence: Synthetic polypeptide"
EVQLVQSGAEVKKPGSSVKVSCKASGGTFSWYAISWVRQAPGQGLEWMGGITPILGTASYAQKFQGRVTITADESTSTAYMELSSLRSEDTAVYYCARGLYYDPTRADYWGQGTLVTVSS

SEQ ID NO: 145 - protein, 120 aa, Artificial Sequence
  source: /note="Description of Artificial Sequence: Synthetic polypeptide"
EVQLVQSGAEVKKPGSSVKVSCKASGGTFSWYAISWVRQAPGQGLEWMGGITPILGTAIYAQKFQGRVTITADESTSTAYMELSSLRSEDTAVYYCARGLYYDPTRADYWGQGTLVTVSS

SEQ ID NO: 146 - protein, 120 aa, Artificial Sequence
  source: /note="Description of Artificial Sequence: Synthetic polypeptide"
EVQLVQSGAEVKKPGSSVKVSCKASGGTFSWYAISWVRQAPGQGLEWMGGITPILGSPAYAQKFQGRVTITADESTSTAYMELSSLRSEDTAVYYCARGLYYDPTRADYWGQGTLVTVSS

SEQ ID NO: 147 - protein, 120 aa, Artificial Sequence
  source: /note="Description of Artificial Sequence: Synthetic polypeptide"
EVQLVQSGAEVKKPGSSVKVSCKASGGTFSRYAISWVRQAPGQGLEWMGGIIPILGPASYAQKFQGRVTITADESTSTAYMELSSLRSEDTAVYYCARGLYYDPTRADYWGQGTLVTVSS

SEQ ID NO: 148 - protein, 120 aa, Artificial Sequence
  source: /note="Description of Artificial Sequence: Synthetic polypeptide"
EVQLVQSGAEVKKPGSSVKVSCKASGGTFSWYAISWVRQAPGQGLEWMGGITPILDAAIYAQKFQGRVTITADESTSTAYMELSSLRSEDTAVYYCARGLYYDPTRADYWGQGTLVTVSS

SEQ ID NO: 149 - protein, 120 aa, Artificial Sequence
  source: /note="Description of Artificial Sequence: Synthetic polypeptide"
EVQLVQSGAEVKKPGSSVKVSCKASGGTFSWYTISWVRQAPGQGLEWMGGIMPILGIPNYAQKFQGRVTITADESTSTAYMELSSLRSEDTAVYYCARGLYYDPTRADYWGQGTLVTVSS

SEQ ID NO: 150 - protein, 120 aa, Artificial Sequence
  source: /note="Description of Artificial Sequence: Synthetic polypeptide"
EVQLVQSGAEVKKPGSSVKVSCKASGGTFSIYAISWVRQAPGQGLEWMGGITPILGSAIYAQKFQGRVTITADESTSTAYMELSSLRSEDTAVYYCARGLYYDPTRADYWGQGTLVTVSS

SEQ ID NO: 151 - protein, 120 aa, Artificial Sequence
  source: /note="Description of Artificial Sequence: Synthetic polypeptide"
EVQLVQSGAEVKKPGSSVKVSCKASGGTFSYYAISWVRQAPGQGLEWMGGIMPILGTATYAQKFQGRVTITADESTSTVYMELSSLRSEDTAVYYCARGLYYDPTRADYWGQGTLVTVSS

SEQ ID NO: 152 - protein, 120 aa, Artificial Sequence
  source: /note="Description of Artificial Sequence: Synthetic polypeptide"
EVQLVQSGAEVKKPGSSVKVSCKASGGTFSSYAISWVRQAPGQGLEWMGGIIPILGTANYAQKFQGRVTITADESTSTVYMELSSLRSEDTAVYYCARGVYFDPKRADYWGQGTLVTVSS

SEQ ID NO: 153 - protein, 120 aa, Artificial Sequence
  source: /note="Description of Artificial Sequence: Synthetic polypeptide"
EVQLVQSGAEVKKPGSSVKVSCKASGGTFNWYTISWVRQAPGQGLEWMGGIMPILGTANYAQKFQGRVTITADESTSTAYMELSSLRSEDTAVYYCARGLYYDPTRADYWGQGTLVTVSS

SEQ ID NO: 154 - protein, 120 aa, Artificial Sequence
  source: /note="Description of Artificial Sequence: Synthetic polypeptide"
EVQLVQSGAEVKKPGSSVKVSCKASGGTFSSYAISWVRQAPGQGLEWMGGIIPILGTANYAQKFQGRVTITADESTSTVYMELSSLRSEDTAVYYCARGVYFDFTRADYWGQGTLVTVSS

SEQ ID NO: 155 - protein, 120 aa, Artificial Sequence
  source: /note="Description of Artificial Sequence: Synthetic polypeptide"
EVQLVQSGAEVKKPGSSVKVSCKASGGTFSWYAISWVRQAPGQGLEWMGGIIPILRFPTYAQKFQGRVTITADESTSTVYMELSSLRSEDTAVYYCARGLYYDPTRADYWGQGTLVTVSS

SEQ ID NO: 156 - protein, 120 aa, Artificial Sequence
  source: /note="Description of Artificial Sequence: Synthetic polypeptide"
EVQLVQSGAEVKKPGSSVKVSCKVSGGTFSWYSISWVRQAPGQGLEWMGGILPILDTANYAQKFQGRVTITADESTSTAYMELSSLRSEDTAVYYCARGLYYDPTRADYWGQGTLVTVSS

SEQ ID NO: 157 - protein, 120 aa, Artificial Sequence
  source: /note="Description of Artificial Sequence: Synthetic polypeptide"
EVQLVQSGAEVKKPGSSVKVSCKASGGTFSWYAISWVRQAPGQGLEWMGGIMPILGTAVYAQKFQGRVTITADESTSTAYMELSSLRSEDTAVYYCARGLYYDPTRADYWGQGTLVTVSS

SEQ ID NO: 158 - protein, 120 aa, Artificial Sequence
  source: /note="Description of Artificial Sequence: Synthetic polypeptide"
EVQLVQSGAEVKKPGSSVKVSCKASGGTFSIYSISWVRQAPGQGLEWMGGILPILGTANYAQKFQGRVTITADESTSTVYMELSSLRSEDTAVYYCARGLYYDPTRADYWGQGTLVTVSS

SEQ ID NO: 159 - protein, 120 aa, Artificial Sequence
  source: /note="Description of Artificial Sequence: Synthetic polypeptide"
EVQLVQSGAEVKKPGSSVKVSCKASGGTFSSYAISWVRQAPGQGLEWMGGIIPILGTANYAQKFQGRVTITADESTSTVYMELSSLRSEDTAVYYCARGVYYDPTRADYWGQGTLVTVSS

SEQ ID NO: 160 - protein, 120 aa, Artificial Sequence
  source: /note="Description of Artificial Sequence: Synthetic polypeptide"
EVQLVQSGAEVKKPGSSVKVSCKASGGTFSSYAISWVRQAPGQGLEWMGGIIPILGTANYAQKFQGRVTITADESTSTVYMELSSLRSEDTAVYYCARGLYYDPSRADYWGQGTLVTVSS

SEQ ID NO: 161 - protein, 120 aa, Artificial Sequence
  source: /note="Description of Artificial Sequence: Synthetic polypeptide"
EVQLVQSGAEVKKPGSSVKVSCKASGGTFSSYAISWVRQAPGQGLEWMGGIIPILGTANYAQKFQGRVTITADESTSTVYMELSSLRSEDTAVYYCARGVYFNPTRADYWGQGTLVTVSS

SEQ ID NO: 162 - protein, 120 aa, Artificial Sequence
  source: /note="Description of Artificial Sequence: Synthetic polypeptide"
EVQLVQSGAEVKKPGSSVKVSCKASGGTFSSYAISWVRQAPGQGLEWMGGIIPILGTANYAQKFQGRVTITADESTSTVYMELSSLRSEDTAVYYCARGLYYDPARFDYWGQGTLVTVSS

SEQ ID NO: 163 - protein, 120 aa, Artificial Sequence
  source: /note="Description of Artificial Sequence: Synthetic polypeptide"
EVQLVQSGAEVKKPGSSVKVSCKASGGTFSSYAISWVRQAPGQGLEWMGGIIPILGTANYAQKFQGRVTITADESTSTVYMELSSLRSEDTAVYYCARGLYYNPSRADYWGQGTLVTVSS

SEQ ID NO: 164 - protein, 120 aa, Artificial Sequence
  source: /note="Description of Artificial Sequence: Synthetic polypeptide"
EVQLVQSGAEVKKPGSSVKVSCKASGGTFSSYAISWVRQAPGQGLEWMGGIIPILGTANYAQKFQGRVTITADESTSTVYMELSSLRSEDTAVYYCARGLYYDPKRADYWGQGTLVTVSS

SEQ ID NO: 165 - protein, 120 aa, Artificial Sequence
  source: /note="Description of Artificial Sequence: Synthetic polypeptide"
EVQLVQSGAEVKKPGSSVKVSCKASGGTFSSYAISWVRQAPGQGLEWMGGIIPILGTANYAQKFQGRVTITADESTSTVYMELSSLRSEDTAVYYCARGLYYDPRRADYWGQGTLVTVSS

SEQ ID NO: 166 - protein, 120 aa, Artificial Sequence
  source: /note="Description of Artificial Sequence: Synthetic polypeptide"
EVQLVQSGAEVKKPGSSVKVSCKASGGTFSSYAISWVRQAPGQGLEWMGGIIPILGTANYAQKFQGRVTITADESTSTVYMELSSLRSEDTAVYYCARGFYYDPTRADYWGQGTLVTVSS

SEQ ID NO: 167 - protein, 120 aa, Artificial Sequence
  source: /note="Description of Artificial Sequence: Synthetic polypeptide"
EVQLVQSGAEVKKPGSSVKVSCKASGGTFSSYAISWVRQAPGQGLEWMGGIIPILGTANYAQKFQGRVTITADESTSTVYMELSSLRSEDTAVYYCARGLYYDFTRADYWGQGTLVTVSS

SEQ ID NO: 168 - protein, 120 aa, Artificial Sequence
  source: /note="Description of Artificial Sequence: Synthetic polypeptide"
EVQLVQSGAEVKKPGSSVKVSCKASGGTFSSYAISWVRQAPGQGLEWMGGIIPILGTANYAQKFQGRVTITADESTSTVYMELSSLRSEDTAVYYCARGLYFDPKRADYWGQGTLVTVSS

SEQ ID NO: 169 - protein, 120 aa, Artificial Sequence
  source: /note="Description of Artificial Sequence: Synthetic polypeptide"
EVQLVQSGAEVKKPGSSVKVSCKASGGTFSSYAISWVRQAPGQGLEWMGGIIPILGTANYAQKFQGRVTITADESTSTVYMELSSLRSEDTAVYYCARGVYFDPTRADYWGQGTLVTVSS

SEQ ID NO: 170 - protein, 120 aa, Artificial Sequence
  source: /note="Description of Artificial Sequence: Synthetic polypeptide"
EVQLVQSGAEVKKPGSSVKVSCKASGGTFSSYAISWVRQAPGQGLEWMGGIIPILGTANYAQKFQGRVTITADESTSTVYMELSSLRSEDTAVYYCARGIYYDPSRADYWGQGTLVTVSS

SEQ ID NO: 171 - protein, 120 aa, Artificial Sequence
  source: /note="Description of Artificial Sequence: Synthetic polypeptide"
EVQLVQSGAEVKKPGSSVKVSCKASGGTFSSYAISWVRQAPGQGLEWMGGIIPILGTANYAQKFQGRVTITADESTSTVYMELSSLRSEDTAVYYCARSLYYERTRADYWGQGTLVTVSS

SEQ ID NO: 172 - protein, 120 aa, Artificial Sequence
  source: /note="Description of Artificial Sequence: Synthetic polypeptide"
EVQLVQSGAEVKKPGSSVKVSCKASGGTFSSYAISWVRQAPGQGLEWMGGIIPILGTANYAQKFQGRVTITADESTSTVYMELSSLRSEDTAVYYCARWRFYIPIRFDYWGQGTLVTVSS

SEQ ID NO: 173 - protein, 120 aa, Artificial Sequence
  source: /note="Description of Artificial Sequence: Synthetic polypeptide"
EVQLVQSGAEVKKPGSSVKVSCKASGGTFSSYAISWVRQAPGQGLEWMGGIIPILGTANYAQKFQGRVTITADESTSTVYMELSSLRSEDTAVYYCARGVYYDFTRADYWGQGTLVTVSS

SEQ ID NO: 174 - protein, 120 aa, Artificial Sequence
  source: /note="Description of Artificial Sequence: Synthetic polypeptide"
EVQLVQSGAEVKKPGSSVKVSCKASGGTFSSYAISWVRQAPGQGLEWMGGIIPILGTANYAQKFQGRVTITADESTSTVYMELSSLRSEDTAVYYCARGLFYDPSRADYWGQGTLVTVSS

SEQ ID NO: 175 - protein, 120 aa, Artificial Sequence
  source: /note="Description of Artificial Sequence: Synthetic polypeptide"
EVQLVQSGAEVKKPGSSVKVSCKASGGTFSSYAISWVRQAPGQGLEWMGGIIPILGTANYAQKFQGRVTITADESTSTVYMELSSLRSEDTAVYYCARGVYYDPVRADYWGQGTLVTVSS

SEQ ID NO: 176 - protein, 120 aa, Artificial Sequence
  source: /note="Description of Artificial Sequence: Synthetic polypeptide"
EVQLVQSGAEVKKPGSSVKVSCKASGGTFSSYAISWVRQAPGQGLEWMGGIIPILGTANYAQKFQGRVTITADESTSTVYMELSSLRSEDTAVYYCARGVYYDPIRADYWGQGTLVTVSS

SEQ ID NO: 177 - protein, 120 aa, Artificial Sequence
  source: /note="Description of Artificial Sequence: Synthetic polypeptide"
EVQLVQSGAEVKKPGSSVKVSCKASGGTFSSYAISWVRQAPGQGLEWMGGIIPILGTANYAQKFQGRVTITADESTSTVYMELSSLRSEDTAVYYCARGIYYDPKRADYWGQGTLVTVSS

SEQ ID NO: 178 - protein, 120 aa, Artificial Sequence
  source: /note="Description of Artificial Sequence: Synthetic polypeptide"
EVQLVQSGAEVKKPGSSVKVSCKASGGTFSSYAISWVRQAPGQGLEWMGGIIPILGTANYAQKFQGRVTITADESTSTVYMELSSLRSEDTAVYYCARGLYYNPIRFDYWGQGTLVTVSS

SEQ ID NO: 179 - protein, 120 aa, Artificial Sequence
  source: /note="Description of Artificial Sequence: Synthetic polypeptide"
EVQLVQSGAEVKKPGSSVKVSCKASGGTFSSYAISWVRQAPGQGLEWMGGIIPILGTANYAQKFQGRVTITADESTSTVYMELSSLRSEDTAVYYCARGVYFDPARADYWGQGTLVTVSS

SEQ ID NO: 180 - protein, 120 aa, Artificial Sequence
  source: /note="Description of Artificial Sequence: Synthetic polypeptide"
EVQLVQSGAEVKKPGSSVKVSCKASGGTFSSYAISWVRQAPGQGLEWMGGIIPILGTANYAQKFQGRVTITADESTSTVYMELSSLRSEDTAVYYCARGVFFDPTRADYWGQGTLVTVSS

SEQ ID NO: 181 - protein, 120 aa, Artificial Sequence
  source: /note="Description of Artificial Sequence: Synthetic polypeptide"
EVQLVQSGAEVKKPGSSVKVSCKASGGTFSSYAISWVRQAPGQGLEWMGGIIPILGTANYAQKFQGRVTITADESTSTVYMELSSLRSEDTAVYYCARGVFYNPTRADYWGQGTLVTVSS

SEQ ID NO: 182 - protein, 120 aa, Artificial Sequence
  source: /note="Description of Artificial Sequence: Synthetic polypeptide"
EVQLVQSGAEVKKPGSSVKVSCKASGGTFSSYAISWVRQAPGQGLEWMGGIIPILGTANYAQKFQGRVTITADESTSTVYMELSSLRSEDTAVYYCARGLYYEGPSADYWGQGTLVTVSS

SEQ ID NO: 183 - protein, 120 aa, Artificial Sequence
  source: /note="Description of Artificial Sequence: Synthetic polypeptide"
EVQLVQSGAEVKKPGSSVKVSCKASGGTFSSYAISWVRQAPGQGLEWMGGIIPILGTANYAQKFQGRVTITADESTSTVYMELSSLRSEDTAVYYCARGLYYAPNRADYWGQGTLVTVSS

SEQ ID NO: 184 - protein, 120 aa, Artificial Sequence
  source: /note="Description of Artificial Sequence: Synthetic polypeptide"
EVQLVQSGAEVKKPGSSVKVSCKASGGTFSSYAISWVRQAPGQGLEWMGGIIPILGTANYAQKFQGRVTITADESTSTVYMELSSLRSEDTAVYYCARGLFYDPTRADYWGQGTLVTVSS

SEQ ID NO: 185 - protein, 120 aa, Artificial Sequence
  source: /note="Description of Artificial Sequence: Synthetic polypeptide"
EVQLVQSGAEVKKPGSSVKVSCKASGGTFSSYAISWVRQAPGQGLEWMGGIIPILGTANYAQKFQGRVTITADESTSTVYMELSSLRSEDTAVYYCARGVYYNPTRADYWGQGTLVTVSS

SEQ ID NO: 186 - protein, 120 aa, Artificial Sequence
  source: /note="Description of Artificial Sequence: Synthetic polypeptide"
EVQLVQSGAEVKKPGSSVKVSCKASGGTFSSYAISWVRQAPGQGLEWMGGIIPILGTANYAQKFQGRVTITADESTSTVYMELSSLRSEDTAVYYCARGVYYDPARADYWGQGTLVTVSS

SEQ ID NO: 187 - protein, 120 aa, Artificial Sequence
  source: /note="Description of Artificial Sequence: Synthetic polypeptide"
EVQLVQSGAEVKKSGSSVKVSCKASGGTFSSYAISWVRQAPGQGLEWMGGIIPILGTANYAQKFQGRVTITADESTSTVYMELSSLRSEDTAVYYCARGVYYDPGRADYWGQGTLVTVSS

SEQ ID NO: 188 - protein, 120 aa, Artificial Sequence
  source: /note="Description of Artificial Sequence: Synthetic polypeptide"
EVQLVQSGAEVKKPGSSVKVSCKASGGTFSSYAISWVRQAPGQGLEWMGGIIPILGTANYAQKFQGRVTITADESTSTVYMELSSLRSEDTAVYYCARGVYFDPSRADYWGQGTLVTVSS

SEQ ID NO: 189 - protein, 120 aa, Artificial Sequence
  source: /note="Description of Artificial Sequence: Synthetic polypeptide"
EVQLVQSGAEVKKPGSSVKVSCKASGGTFSSYAISWVRQAPGQGLEWMGGIIPILGTANYAQKFQGRVTITADESTSTVYMELSSLRSEDTAVYYCARGLYFDPSRFDYWGQGTLVTVSS

SEQ ID NO: 190 - protein, 120 aa, Artificial Sequence
  source: /note="Description of Artificial Sequence: Synthetic polypeptide"
EVQLVQSGAEVKKPGSSVKVSCKASGGTFSSYAISWVRQAPGQGLEWMGGIIPILGTANYAQKFQGRVTITADESTSTVYMELSSLRSEDTAVYYCARGLYFDFTRADYWGQGTLVTVSS

SEQ ID NO: 191 - protein, 120 aa, Artificial Sequence
  source: /note="Description of Artificial Sequence: Synthetic polypeptide"
EVQLVQSGAEVKKPGSSVKVSCKASGGTFSSYAISWVRQAPGQGLEWMGGIIPILGTANYAQKFQGRVTITADESTSTVYMELSSLRSEDTAVYYCARGIYYDPTRADYWGQGTLVTVSS

SEQ ID NO: 192 - protein, 120 aa, Artificial Sequence
  source: /note="Description of Artificial Sequence: Synthetic polypeptide"
EVQLVQSGAEVKKPGSSVKVSCKASGGTFSSYAISWVRQAPGQGLEWMGGIIPILGTANYAQKFQGRVTITADESTSTVYMELSSLRSEDTAVYYCARGLYFDPSRADYWGQGTLVTVSS

SEQ ID NO: 193 - protein, 120 aa, Artificial Sequence
  source: /note="Description of Artificial Sequence: Synthetic polypeptide"
EVQLVQSGAEVKKPGSSVKVSCKASGGTFSSYAISWVRQAPGQGLEWMGGIIPILGTANYAQKFQGRVTITADESTSTVYMELSSLRSEDTAVYYCARGVYYDPSRFDYWGQGTLVTVSS

SEQ ID NO: 194 - protein, 120 aa, Artificial Sequence
  source: /note="Description of Artificial Sequence: Synthetic polypeptide"
EVQLVQSGAEVKKPGSSVKVSCKASGGTFSSYAISWVRQAPGQGLEWMGGIIPILGTANYAQKFQGRVTITADESTSTVYMELSSLRSEDTAVYYCARGQYYDTSRADYWGQGTLVTVSS

SEQ ID NO: 195 - protein, 120 aa, Artificial Sequence
  source: /note="Description of Artificial Sequence: Synthetic polypeptide"
EVQLVQSGAEVKKPGSSVKVSCKASGGTFSSYAISWVRQAPGQGLEWMGGIIPILGTANYAQKFQGRVTITADESTSTVYMELSSLRSEDTAVYYCARSLYYDTTRFDYWGQGTLVTVSS

SEQ ID NO: 196 - protein, 120 aa, Artificial Sequence
  source: /note="Description of Artificial Sequence: Synthetic polypeptide"
EVQLVQSGAEVKKPGSSVKVSCKASGGTFSSYAISWVRQAPGQGLEWMGGIIPILGTANYAQKFQGRVTITADESTSTVYMELSSLRSEDTAVYYCARGVFYDPTRADYWGQGTLVTVSS

SEQ ID NO: 197 - protein, 120 aa, Artificial Sequence
  source: /note="Description of Artificial Sequence: Synthetic polypeptide"
EVQLVQSGAEVKKPGSSVKVSCKASGGTFSSYAISWVRQAPGQGLEWMGGIIPILGTANYAQKFQGRVTITADESTSTVYMELSSLRSEDTAVYYCARGIYYDPARADYWGQGTLVTVSS

SEQ ID NO: 198 - protein, 120 aa, Artificial Sequence
  source: /note="Description of Artificial Sequence: Synthetic polypeptide"
EVQLVQSGAEVKKPGSSVKVSCKASGGTFSSYAISWVRQAPGQGLEWMGGIIPILGTANYAQKFQGRVTITADESTSTVYMELSSLRSEDTAVYYCARGLFYDPRRADYWGQGTLVTVSS

SEQ ID NO: 199 - protein, 120 aa, Artificial Sequence
  source: /note="Description of Artificial Sequence: Synthetic polypeptide"
EVQLVQSGAEVKKPGSSVKVSCKASGGTFSSYAISWVRQAPGQGLEWMGGIIPILGTANYAQKFQGRVTITADESTSTVYMELSSLRSEDTAVYYCARGVYYDTTRADYWGQGTLVTVSS

SEQ ID NO: 200 - protein, 120 aa, Artificial Sequence
  source: /note="Description of Artificial Sequence: Synthetic polypeptide"
EVQLVQSGAEVKKPGSSVKVSCKASGGTFSSYAISWVRQAPGQGLEWMGGIIPILGTANYAQKFQGRVTITADESTSTVYMELSSLRSEDTAVYYCARGLYYDPARADYWGQGTLVTVSS

SEQ ID NO: 201 - protein, 120 aa, Artificial Sequence
  source: /note="Description of Artificial Sequence: Synthetic polypeptide"
EVQLVQSGAEVKKPGSSVKVSCKASGGTFSSYAISWVRQAPGQGLEWMGGIIPILGTANYAQKFQGRVTITADESTSTVYMELSSLRSEDTAVYYCSRGLYYDPTRADYWGQGTLVTVSS

SEQ ID NO: 202 - protein, 120 aa, Artificial Sequence
  source: /note="Description of Artificial Sequence: Synthetic polypeptide"
EVQLVQSGAEVMKPGSSVKVSCKASGGTFSSYAISWVRQAPGQGLEWMGGIIPILGTANYAQKFQGRVTITADESTSTVYMELSSLRSEDTAVYYCTRGLYYDPTRADYWGQGTLVTVSS

SEQ ID NO: 203 - protein, 120 aa, Artificial Sequence
  source: /note="Description of Artificial Sequence: Synthetic polypeptide"
EVQLVQSGAEVKKPGASVKVSCKASGYTFNNYAISWVRQAPGQGLEWMGGIIPILGTANYAQKFQGRVTITADESTSTVYMELSSLRSEDTAVYYCARGLYYDPTRADYWGQGTLVTVSS

SEQ ID NO: 204 - protein, 120 aa, Artificial Sequence
  source: /note="Description of Artificial Sequence: Synthetic polypeptide"
EVQLVQSGAEVKKPGSSVKVSCKASGGTFSSYAISWVRQAPGQGLEWMGGIIPILGTANYAQKFQGRVTITADESTSTVYMELSSLRSEDTAVYYCTRGLYYDPTRADYWGQGTLVTVSS

SEQ ID NO: 205 - protein, 120 aa, Artificial Sequence
  source: /note="Description of Artificial Sequence: Synthetic polypeptide"
EVQLVQSGAEVKKPGSSVKVSCKASGGTFSSYAISWVRQAPGQGLEWMGGIIPILGTANYAQKFQGRVTITADESTSTVYMELSSLRSEDTAVYYCTRGIYYDPTRADYWGQGTLVTVSS

SEQ ID NO: 206 - protein, 120 aa, Artificial Sequence
  source: /note="Description of Artificial Sequence: Synthetic polypeptide"
EVQLVQSGAEVKKPGSSVKVSCKASGGTFSSYAISWVRQAPGQGLEWMGGIIPILGTANYAQEFQGRVTITADESTSTVYMELSSLRSEDTAVYYCARGLYYDPTRADYWGQGTLVTVSS

SEQ ID NO: 207 - protein, 120 aa, Artificial Sequence
  source: /note="Description of Artificial Sequence: Synthetic polypeptide"
EVQLVQSGAEVKKPGSSVKVSCKASGGTFSSYAISWVRQAPGQGLEWMGGIIPILGTANYAQKFQGRVTITADESTSTVYMELSSLRSEDTAVYYCVRGLYYDPTRADYWGQGTLVTVSS

SEQ ID NO: 208 - protein, 120 aa, Artificial Sequence
  source: /note="Description of Artificial Sequence: Synthetic polypeptide"
EVQLVQSGAEVKKPGSSVKVSCKASGGTFSSYAISWVRQAPGQGLEWMGGIIPILGTASYAQKFQGRVTITADESTSTVYMELSSLRSEDTAVYYCARGLYYDPTRADYWGQGTLVTVSS

SEQ ID NO: 209 - protein, 120 aa, Artificial Sequence
  source: /note="Description of Artificial Sequence: Synthetic polypeptide"
EVQLVQSGAEVKKPGSSVKVSCKASGGTFSSYAISWVRQAPGQGLEWMGGIIPILGTANYAQKFQGRVTITADESTSTVYMELSSLRSEDTAVYYCAKGLYYDPTRADYWGQGTLVTVSS

SEQ ID NO: 210 - protein, 120 aa, Artificial Sequence
  source: /note="Description of Artificial Sequence: Synthetic polypeptide"
EVQLVQSGAEVKKPGSSVKVSCKASGGTFSSYAISWVRQAPGQGLEWMGGIIPILGTANYAQKFQGRVTITADESTSTVYMELSSLRSEDTAVYYCERGLYYDPTRADYWGQGTLVTVSS

SEQ ID NO: 211 - protein, 120 aa, Artificial Sequence
  source: /note="Description of Artificial Sequence: Synthetic polypeptide"
EVQLVQSGAEVKKPGSSVKVSCKASGGTFSNYAISWVRQAPGQGLEWMGGIIPILGTANYAQKFQGRVTITADESTSTVYMELSSLRSEDTAVYYCARGLYYDPTRADYWGQGTLVTVSS

SEQ ID NO: 212 - protein, 120 aa, Artificial Sequence
  source: /note="Description of Artificial Sequence: Synthetic polypeptide"
EVQLVQSGAEVKKPGSSVKVSCKASGGTFSSYAISWVRQAPGQGLEWMGGIIPILGTANYAHKFQGRVTITADESTSTVYMELSSLRSEDTAVYYCARGLYYDPTRADYWGQGTLVTVSS

SEQ ID NO: 213 - protein, 120 aa, Artificial Sequence
  source: /note="Description of Artificial Sequence: Synthetic polypeptide"
EVQLVQSGAEVKKPGSSVKVSCKASGGTFSSYAISWVRQAPGQGLEWMGGIIPILGTANYAQKFQGRVTITADESTSTVYMELSSLRSEDTAVYYCARGLYYDPTRADCWGQGTLVTVSS

SEQ ID NO: 214 - protein, 120 aa, Artificial Sequence
  source: /note="Description of Artificial Sequence: Synthetic polypeptide"
EVQLVQSGAEVKKPGSSVKVSCKASGGTFSSYAISWVQQAPGQGLEWMGGIIPILGTANYAQKFQGRVTITADESTSTVYMELSSLRSEDTAVYYCARGLYYDPTRADYWGQGTLVTVSS

SEQ ID NO: 215 - protein, 120 aa, Artificial Sequence
  source: /note="Description of Artificial Sequence: Synthetic polypeptide"
EVQLVQSGAEVKKPGSSVKVSCKASGGTFSSYAISWVRQAPGQGLEWMGGITPILGTANYAQKFQGRVTITADESTSTVYMELSSLRSEDTAVYYCARGLYYDPTRADYWGQGTLVTVSS

SEQ ID NO: 216 - protein, 120 aa, Artificial Sequence
  source: /note="Description of Artificial Sequence: Synthetic polypeptide"
EVQLVQSGAEVKKPGSSVKVSCKASGGTFSSYAISWVRQAPGQGLEWMGGIIPILGTANYAQKFQGRVTITADESTSTVYMELSSLRSEDTAVYYCARGLYYDPTRADYWGQGTLVTVSS

SEQ ID NO: 217 - protein, 120 aa, Artificial Sequence
  source: /note="Description of Artificial Sequence: Synthetic polypeptide"
EVQLVQSGAEVKKPGSSVKVSCKASGGTFSSYATSWVRQAPGQGLEWMGGIIPILGTANYAQKFQGRVTITADESTSTVYMELSSLRSEDTAVYYCARGLYYDPTRADYWGQGTLVTVSS

SEQ ID NO: 218 - protein, 120 aa, Artificial Sequence
  source: /note="Description of Artificial Sequence: Synthetic polypeptide"
EVQLVQSGAEVKKPGSSVKVSCKASGGTFSSYAISWVRQAPGQGLEWMGGIIPILGTANYAQKFLGRVTITADESTSTVYMELSSLRSEDTAVYYCARGLYYDPTRADYWGQGTLVTVSS

SEQ ID NO: 219 - protein, 120 aa, Artificial Sequence
  source: /note="Description of Artificial Sequence: Synthetic polypeptide"
EVQLVQSGAEVKKPGSSVKVSCKASGGTSSSYAISWVRQAPGQGLEWMGGIIPILGTANYAQKFQGRVTITADESTSTVYMELSSLRSEDTAVYYCARGLYYDPTRADYWGQGTLVTVSS

SEQ ID NO: 220 - protein, 120 aa, Artificial Sequence
  source: /note="Description of Artificial Sequence: Synthetic polypeptide"
EVQLVQSGAEVKKPGSSVKVSCKASGGTFSWYAISWVRQAPGQGLEWMGGITPILGSATYAQKFQGRVTITADESTSTVYMELSSLRSEDTAVYYCARGLYYDPKRADYWGQGTLVTVSS

SEQ ID NO: 221 - protein, 120 aa, Artificial Sequence
  source: /note="Description of Artificial Sequence: Synthetic polypeptide"
EVQLVQSGAEVKKPGSSVKVSCKASGGTFSWYAISWVRQAPGQGLEWMGGITPILGAASYAQKFQGRVTITADESTSTVYMELSSLRSEDTAVYYCARGIYYDPTRADYWGQGTLVTVSS

SEQ ID NO: 222 - protein, 120 aa, Artificial Sequence
  source: /note="Description of Artificial Sequence: Synthetic polypeptide"
EVQLVQSGAEVKKPGSSVKVSCKASGGTFSWYAISWVRQAPGQGLEWMGGITPILGAASYAQKFQGRVTITADESTSTVYMELSSLRSEDTAVYYCARGIYYDPARADYWGQGTLVTVSS

SEQ ID NO: 223 - protein, 120 aa, Artificial Sequence
  source: /note="Description of Artificial Sequence: Synthetic polypeptide"
EVQLVQSGAEVKKPGSSVKVSCKASGGTFSWYAISWVRQAPGQGLEWMGGITPILGAANYAQKFQGRVTITADESTSTVYMELSSLRSEDTAVYYCARGVYYDPKRADYWGQGTLVTVSS

SEQ ID NO: 224 - protein, 120 aa, Artificial Sequence
  source: /note="Description of Artificial Sequence: Synthetic polypeptide"
EVQLVQSGAEVKKPGSSVKVSCKASGGTFSWYTISWVRQAPGQGLEWMGGIMPILGSPTYAQKFQGRVTITADESTSTVYMELSSLRSEDTAVYYCARGVYYDPRRADYWGQGTLVTVSS

SEQ ID NO: 225 - protein, 120 aa, Artificial Sequence
  source: /note="Description of Artificial Sequence: Synthetic polypeptide"
EVQLVQSGAEVKKPGSSVKVSCKASGGTFSWYAISWVRQAPGQGLEWMGGITPILGSATYAQKFQGRVTITADESTSTVYMELSSLRSEDTAVYYCARGIYYDPKRADYWGQGTLVTVSS

SEQ ID NO: 226 - protein, 120 aa, Artificial Sequence
  source: /note="Description of Artificial Sequence: Synthetic polypeptide"
EVQLVQSGAEVKKPGSSVKVSCKASGGTFSWYAISWVRQAPGQGLEWMGGIVPILGTPIYAQKFQGRVTITADESTSTVYMELSSLRSEDTAVYYCARGVYYDPKRADYWGQGTLVTVSS

SEQ ID NO: 227 - protein, 120 aa, Artificial Sequence
  source: /note="Description of Artificial Sequence: Synthetic polypeptide"
EVQLVQSGAEVKKPGSSVKVSCKASGGTFSWYAISWVRQAPGQGLEWMGGITPILGSANYAQKFQGRVTITADESTSTVYMELSSLRSEDTAVYYCARGLYYDPARADYWGQGTLVTVSS

SEQ ID NO: 228 - protein, 120 aa, Artificial Sequence
  source: /note="Description of Artificial Sequence: Synthetic polypeptide"
EVQLVQSGAEVKKPGSSVKVSCKASGGTFSWYAISWVRQAPGQGLEWMGGITPILGSPTYAQKFQGRVTITADESTSTVYMELSSLRSEDTAVYYCARGVYYDPKRADYWGQGTLVTVSS

SEQ ID NO: 229 - protein, 120 aa, Artificial Sequence
  source: /note="Description of Artificial Sequence: Synthetic polypeptide"
EVQLVQSGAEVKKPGSSVKVSCKASGGTFSWYTISWVRQAPGQGLEWMGGIMPILGTPVYAQKFQGRVTITADESTSTVYMELSSLRSEDTAVYYCARGVYYDFRRANYWGQGTLVTVSS

SEQ ID NO: 230 - protein, 120 aa, Artificial Sequence
  source: /note="Description of Artificial Sequence: Synthetic polypeptide"
EVQLVQSGAEVKKPGSSVKVSCKASGGTFSWYAISWVRQAPGQGLEWMGGITPILGAATYAQKFQGRVTITADESTSTVYMELSSLRSEDTAVYYCARGIYYDPKRADYWGQGTLVTVSS

SEQ ID NO: 231 - protein, 120 aa, Artificial Sequence
  source: /note="Description of Artificial Sequence: Synthetic polypeptide"
EVQLVQSGAEVKKPGSSVKVSCKASGGTFSWYAISWVRQAPGQGLEWMGGITPILGDPIYAQKFQGRVTITADESTSTVYMELSSLRSEDTAVYYCARGIYYDPKRADYWGQGTLVTVSS

SEQ ID NO: 232 - protein, 120 aa, Artificial Sequence
  source: /note="Description of Artificial Sequence: Synthetic polypeptide"
EVQLVQSGAEVKKPGSSVKVSCKASGGTFSWYAISWVRQAPGQGLEWMGGITPILGNPIYAQKFQGRVTITADESTSTVYMELSSLRSEDTAVYYCARGIYYDYKRADYWGQGTLVTVSS

SEQ ID NO: 233 - protein, 120 aa, Artificial Sequence
  source: /note="Description of Artificial Sequence: Synthetic polypeptide"
EVQLVQSGAEVKKPGSSVKVSCKASGGTFSWYAISWVRQAPGQGLEWMGGITPILGSANYAQKFQGRVTITADESTSTVYMELSSLRSEDTAVYYCARGLFYDFRRADYWGQGTLVTVSS

SEQ ID NO: 234 - protein, 120 aa, Artificial Sequence
  source: /note="Description of Artificial Sequence: Synthetic polypeptide"
EVQLVQSGAEVKKPGSSVKVSCKASGGTFAWYAISWVRQAPGQGLEWMGGITPILGNAIYAQKFQGRVTITADESTSTVYMELSSLRSEDTAVYYCARGVYYDPKRADYWGQGTLVTVSS

SEQ ID NO: 235 - protein, 120 aa, Artificial Sequence
  source: /note="Description of Artificial Sequence: Synthetic polypeptide"
EVQLVQSGAEVKKPGSSVKVSCKASGGTFSWYAISWVRQAPGQGLEWMGGITPILGNPIYAQKFQGRVTITADESTSTVYMELSSLRSEDTAVYYCARGVYYDPKRADYWGQGTLVTVSS

SEQ ID NO: 236 - protein, 120 aa, Artificial Sequence
  source: /note="Description of Artificial Sequence: Synthetic polypeptide"
EVQLVQSGAEVKKPGSSVKVSCKASGGTFSWYATSWVRQAPGQGLEWMGGITPILGSPIYAQKFQGRVTITADESTSTVYMELSSLRSEDTAVYYCARGVYYDHRRADYWGQGTLVTVSS

SEQ ID NO: 237 - protein, 120 aa, Artificial Sequence
  source: /note="Description of Artificial Sequence: Synthetic polypeptide"
EVQLVQSGAEVKKPGSSVKVSCKASGGTFSWYAISWVRQAPGQGLEWMGGITPILGSPIYAQKFQGRVTITADESTSTVYMELSSLRSEDTAVYYCARGVYYDYKRADYWGQGTLVTVSS

SEQ ID NO: 238 - protein, 120 aa, Artificial Sequence
  source: /note="Description of Artificial Sequence: Synthetic polypeptide"
EVQLVQSGAEVKKPGSSVKVSCKASGGTFSWYAISWVRQAPGQGLEWMGGITPILGSAIYAQKFQGRVTITADESTSTVYMELSSLRSEDTAVYYCARGVYYDPKRADYWGQGTLVTVSS

SEQ ID NO: 239 - protein, 120 aa, Artificial Sequence
  source: /note="Description of Artificial Sequence: Synthetic polypeptide"
EVQLVQSGAEVKKPGSSVKVSCKASGGTFSWYAISWVRQAPGQGLEWMGGITPILGTPIYAQKFQGRVTITADESTSTVYMELSSLRSEDTAVYYCARGVYYDFKRADYWGQGTLVTVSS

SEQ ID NO: 240 - protein, 120 aa, Artificial Sequence
  source: /note="Description of Artificial Sequence: Synthetic polypeptide"
EVQLVQSGAEVKKPGSSVKVSCKASGGTFSWYTISWVRQAPGQGLEWMGGIMPILGTPIYAQKFQGRVTITADESTSTVYMELSSLRSEDTAVYYCARGVYYDPRRADYWGQGTLVTVSS

SEQ ID NO: 241 - protein, 120 aa, Artificial Sequence
  source: /note="Description of Artificial Sequence: Synthetic polypeptide"
EVQLVQSGAEVKKPGSSVKVSCKASGGTFSWYAISWVRQAPGQGLEWMGGITPILGSANYAQKFQGRVTITADESTSTVYMELSSLRSEDTAVYYCARGVYYDPKRADYWGQGTLVTVSS

SEQ ID NO: 242 - protein, 120 aa, Artificial Sequence
  source: /note="Description of Artificial Sequence: Synthetic polypeptide"
EVQLVQSGAEVKKPGSSVKVSCKASGGTFSWYAISWVRQAPGQGLEWMGGITPILGAPVYAQKFQGRVTITADESTSTVYMELSSLRSEDTAVYYCARGVYYDPKRADYWGQGTLVTVSS

SEQ ID NO: 243 - protein, 120 aa, Artificial Sequence; identical to SEQ ID NO: 238
  source: /note="Description of Artificial Sequence: Synthetic polypeptide"

SEQ ID NO: 244 - protein, 120 aa, Artificial Sequence
  source: /note="Description of Artificial Sequence: Synthetic polypeptide"
EVQLVQSGAEVKKPGSSVKVSCKASGGTFSWYAISWVRQAPGQGLEWMGGITPILGSPIYAQKFQGRVTITADESTSTVYMELSSLRSEDTAVYYCARGIYYDPKRADYWGQGTLVTVSS

SEQ ID NO: 245 - protein, 120 aa, Artificial Sequence
  source: /note="Description of Artificial Sequence: Synthetic polypeptide"
EVQLVQSGAEVKKPGSSVKVSCKASGGTFSWYTISWVRQAPGQGLEWMGGIMPILGSANYAQKFQGRVTITADESTSTVYMELSSLRSEDTAVYYCARGIYYDPKRADYWGQGTLVTVSS

SEQ ID NO: 246 - protein, 120 aa, Artificial Sequence
  source: /note="Description of Artificial Sequence: Synthetic polypeptide"
EVQLVQSGAEVKKPGSSVKVSCKASGGTFSWYAISWVRQAPGQGLEWMGGITPILGNAIYAQKFQGRVTITADESTSTVYMELSSLRSEDTAVYYCARGIYYDPKRADYWGQGTLVTVSS

SEQ ID NO: 247 - protein, 120 aa, Artificial Sequence
  source: /note="Description of Artificial Sequence: Synthetic polypeptide"
EVQLVQSGAEVKKPGSSVKVSCKASGGTFSWYAISWVRQAPGQGLEWMGGITPILGAATYAQKFQGRVTITADESTSTVYMELSSLRSEDTAVYYCARGVYYDPKRADYWGQGTLVTVSS

SEQ ID NO: 248 - protein, 120 aa, Artificial Sequence
  source: /note="Description of Artificial Sequence: Synthetic polypeptide"
EVQLVQSGAEVKKPGSSVKVSCKASGGTFSWYAISWVRQAPGQGLEWMGGITPILGSPIYAQKFQGRVTITADESTSTVYMELSSLRSEDTAVYYCARGIYYDYRRADYWGQGTLVTVSS

SEQ ID NO: 249 - protein, 120 aa, Artificial Sequence
  source: /note="Description of Artificial Sequence: Synthetic polypeptide"
EVQLVQSGAEVKKPGSSVKVSCKASGGTFSWYAISWVRQAPGQGLEWMGGIMPILGIPTYAQKFQGRVTITADESTSTVYMELSSLRSEDTAVYYCARGVYYDPARADYWGQGTLVTVSS

SEQ ID NO: 250 - protein, 120 aa, Artificial Sequence
  source: /note="Description of Artificial Sequence: Synthetic polypeptide"
EVQLVQSGAEVKKPGSSVKVSCKASGGTFSWYAISWVRQAPGQGLEWMGGITPILGSPIYAQKFQGRVTITADESTSTVYMELSSLRSEDTAVYYCARGVYYDPKRADYWGQGTLVTVSS

SEQ ID NO: 251 - protein, 120 aa, Artificial Sequence
  source: /note="Description of Artificial Sequence: Synthetic polypeptide"
EVQLVQSGAEVKKPGSSVKVSCKASGGTFSWYAISWVRQAPGQGLEWMGGITPILGSAVYAQKFQGRVTITADESTSTVYMELSSLRSEDTAVYYCARGVYYDPKRADYWGQGTLVTVSS

SEQ ID NO: 252 - protein, 120 aa, Artificial Sequence
  source: /note="Description of Artificial Sequence: Synthetic polypeptide"
EVQLVQSGAEVKKPGSSVKVSCKASGGTFSWYAISWVRQAPGQGLEWMGGITPILGSAIYAQKFQGRVTITADESTSTVYMELSSLRSEDTAVYYCARGIYYDYKRADYWGQGTLVTVSS

SEQ ID NO: 253 - protein, 120 aa, Artificial Sequence
  source: /note="Description of Artificial Sequence: Synthetic polypeptide"
EVQLVQSGAEVKKPGSSVKVSCKASGGTFSWYAISWVRQAPGQGLEWMGGITPILGYPIYAQKFQGRVTITADESTSTVYMELSSLRSEDTAVYYCARGVYYDPKRADYWGQGTLVTVSS

SEQ ID NO: 254 - protein, 120 aa, Artificial Sequence
  source: /note="Description of Artificial Sequence: Synthetic polypeptide"
EVQLVQSGAEVKKPGSSVKVSCKASGGTFSWYAISWVRQAPGQGLEWMGGITPILGAATYAQKFQGRVTITADESTSTVYMELSSLRSEDTAVYYCARGIYYDFRRADYWGQGTLVTVSS

SEQ ID NO: 255 - protein, 120 aa, Artificial Sequence
  source: /note="Description of Artificial Sequence: Synthetic polypeptide"
EVQLVQSGAEVKKPGSSVKVSCKASGGTFSWYPISWVRQAPGQGLEWMGGITPILGSAIYAQKFQGRVTITADESTSTVYMELSSLRSEDTAVYYCARGVYYDFRRADYWGQGTLVTVSS

SEQ ID NO: 256 - protein, 120 aa, Artificial Sequence
  source: /note="Description of Artificial Sequence: Synthetic polypeptide"
EVQLVQSGAEVKKPGSSVKVSCKASGGTFSWYAISWVRQAPGQGLEWMGGITPILGTANYAQKFQGRVTITADESTSTVYMELSSLRSEDTAVYYCARGVYYDPKRADYWGQGTLVTVSS

SEQ ID NO: 257 - protein, 120 aa, Artificial Sequence
  source: /note="Description of Artificial Sequence: Synthetic polypeptide"
EVQLVQSGAEVKKPGSSVKVSCKASGGTFSWYAISWVRQAPGQGLEWMGGITPILGSAVYAQKFQGRVTITADESTSTVYMELSSLRSEDTAVYYCARGIYYDPKRADYWGQGTLVTVSS

SEQ ID NO: 258 - protein, 120 aa, Artificial Sequence
  source: /note="Description of Artificial Sequence: Synthetic polypeptide"
EVQLVQSGAEVKKPGSSVKVSCKASGGTFSWYAISWVRQAPGQGLEWMGGITPILGNPIYAQKFQGRVTITADESTSTVYMELSSLRSEDTAVYYCARGVYYDPARADYWGQGTLVTVSS

SEQ ID NO: 259 - protein, 120 aa, Artificial Sequence
  source: /note="Description of Artificial Sequence: Synthetic polypeptide"
EVQLVQSGAEVKKPGSSVKVSCKASGGTFSWYTISWVRQAPGQGLEWMGGIMPILGAPNYAQKFQGRVTITADESTSTVYMELSSLRSEDTAVYYCARGVYYDYTRADYWGQGTLVTVSS

SEQ ID NO: 260 - protein, 120 aa, Artificial Sequence
  source: /note="Description of Artificial Sequence: Synthetic polypeptide"
EVQLVQSGAEVKKPGSSVKVSCKASGGTFAWYAISWVRQAPGQGLEWMGGITPILGSPTYAQKFQGRVTITADESTSTVYMELSSLRSEDTAVYYCARGVYYDPKRADYWGQGTLVTVSS

SEQ ID NO: 261 - protein, 120 aa, Artificial Sequence
  source: /note="Description of Artificial Sequence: Synthetic polypeptide"
EVQLVQSGAEVKKPGSSVKVSCKASGGTFGWYATSWVRQAPGQGLEWMGGIIPILGTPNYAQKFQGRVTITADESTSTVYMELSSLRSEDTAVYYCARGVYYDPKRADYWGQGTLVTVSS

SEQ ID NO: 262 - protein, 120 aa, Artificial Sequence
  source: /note="Description of Artificial Sequence: Synthetic polypeptide"
EVQLVQSGAEVKKPGSSVKVSCKASGGTFSWYTISWVRQAPGQGLEWMGGIMPILGTPTYAQKFQGRVTITADESTSTVYMELSSLRSEDTAVYYCARGVYYDPKRADYWGQGTLVTVSS

SEQ ID NO: 263 - protein, 120 aa, Artificial Sequence
  source: /note="Description of Artificial Sequence: Synthetic polypeptide"
EVQLVQSGAEVKKPGSSVKVSCKASGGTFSWYTISWVRQAPGQGLEWMGGIMPILGSPNYAQKFQGRVTITADESTSTVYMELSSLRSEDTAVYYCARGIYYDPKRADYWGQGTLVTVSS

SEQ ID NO: 264 - protein, 120 aa, Artificial Sequence
  source: /note="Description of Artificial Sequence: Synthetic polypeptide"
EVQLVQSGAEVKKPGSSVKVSCKASGGTFSWYAISWVRQAPGQGLEWMGGIMPILGSATYAQKFQGRVTITADESTSTVYMELSSLRSEDTAVYYCARGVYFDPKRADYWGQGTLVTVSS

SEQ ID NO: 265 - protein, 120 aa, Artificial Sequence
  source: /note="Description of Artificial Sequence: Synthetic polypeptide"
EVQLVQSGAEVKKPGSSVKVSCKASGGTFSWYAISWVRQAPGQGLEWMGGITPILGAANYAQKFQGRVTITADESTSTVYMELSSLRSEDTAVYYCARGLYYDPKRADYWGQGTLVTVSS

SEQ ID NO: 266 - protein, 120 aa, Artificial Sequence
  source: /note="Description of Artificial Sequence: Synthetic polypeptide"
EVQLVQSGAEVKKPGSSVKVSCKASGGTFSWYPISWVRQAPGQGLEWMGGITPILGAGIYAQKFQGRVTITADESTSTVYMELSSLRSEDTAVYYCARGVYYDFKRADYWGQGTLVTVSS

SEQ ID NO: 267 - protein, 108 aa, Artificial Sequence
  source: /note="Description of Artificial Sequence: Synthetic polypeptide"
EIVLTQSPDFQSVTPKEKVTITCRASQSIGSSLHWYQQKPDQSPKLLIKHASQSISGVPSRFSGSGSGTDFTLTINSLEAEDAATYYCHQSSSSPPPTFGQGTKVEIK

SEQ ID NO: 268 - protein, 108 aa, Artificial Sequence
  source: /note="Description of Artificial Sequence: Synthetic polypeptide"
EIVLTQSPDFQSVTPKEKVTITCRASQSIGSSLHWYQQKPDQSPKLLIKHASQSISGVPSRFSGSGSGTDFTLTINSLEAEDAATYYCHQSSSSPPPTFGQWTKVEIK

SEQ ID NO: 269 - protein, 108 aa, Artificial Sequence
  source: /note="Description of Artificial Sequence: Synthetic polypeptide"
EIVLTQSPDFQSVTPKEKVTITCRARQSIGSSLHWYQQKPDQSPKLLIKHASQSISGVPSRFSGSGSGTNFTLTINSLEAEDAATYYCHQSSSSPPPTFGQGTKVEIK

SEQ ID NO: 270 - protein, 108 aa, Artificial Sequence; identical to SEQ ID NO: 267
  source: /note="Description of Artificial Sequence: Synthetic polypeptide"

SEQ ID NO: 271 - protein, 108 aa, Artificial Sequence
  source: /note="Description of Artificial Sequence: Synthetic polypeptide"
EIVLTQSPDFQSVTPKEKVTITCRASQSIGRSLHWYQQKPDQSPKLLIKHASQSVSGVPSRFSGSGSGTDFTLTINSLEAEDAATYYCHQNRSSPPSTFGQGTKVEIK

SEQ ID NO: 272 - protein, 108 aa, Artificial Sequence
  source: /note="Description of Artificial Sequence: Synthetic polypeptide"
EIVLTQSPDFQSVTPKEKVTITCRASQSIGRSLHWYQQKPDQSPKLLIKYASQSLSGVPSRFSGSGSGTDFTLTINSLEAEDAATYYCHQSSSSPPVTFGQGTKVEIK

SEQ ID NO: 273 - protein, 108 aa, Artificial Sequence
  source: /note="Description of Artificial Sequence: Synthetic polypeptide"
EIVLTQSPDFQSVTPKEKVTITCRASQSIGSSLHWYQQKPDQSPKLLIKYASQSISGVPSRFSGSGSGTDFTLTINSLEAEDAATYYCHQRSNLPAPTFGQGTKVEIK

SEQ ID NO: 274 - protein, 108 aa, Artificial Sequence
  source: /note="Description of Artificial Sequence: Synthetic polypeptide"
EIVLTQSPDFQSVTPKEKVTITCRASQIIGGSLHWYQQKPDQSPKLLIKYASQSFSGVPSRFSGSGSGTDFTLTINSLEAEDAATYYCHQPICSPPRTFGQGTKVEIK

SEQ ID NO: 275 - protein, 108 aa, Artificial Sequence
  source: /note="Description of Artificial Sequence: Synthetic polypeptide"
EIVLTQSPDFQSVTPKEKVTITCRASQTIGSNLHWYQQKPDQSPKLLIKYASQSLSGVPSRFSGSGSGTDFTLTINSLEAEDAATYYCHQCSISPPATFGQGTKVEIK

SEQ ID NO: 276 - protein, 108 aa, Artificial Sequence
  source: /note="Description of Artificial Sequence: Synthetic polypeptide"
EIVLTQSPDFQSVTPKEKVTITCRASQCIGTSLHWYQQKPDQSPKLLIKYDSQSISGVPSRFSGSGSGTDFTLTINSLEAEDAATYYCHQNSSSPPPTFGQGTKVEIK

SEQ ID NO: 277 - protein, 108 aa, Artificial Sequence
  source: /note="Description of Artificial Sequence: Synthetic polypeptide"
EIVLTQSPDFQSVTPKEKVTITCRASQNIGNSLHWYQQKPDQSPKLLIKYTSQSISGVPSRFSGSGSGTDFTLTINSLEAEDAATYYCHQTSSLPLPTFGQGTKVEIK

SEQ ID NO: 278 - protein, 108 aa, Artificial Sequence
  source: /note="Description of Artificial Sequence: Synthetic polypeptide"
EIVLTQSPDFQSVTPKEKVTITCRASQSIGSSLHWYQQKPDQSPKLLIKYVSQSISGVPSRFSGSGSGTDFTLTINSLEAEDAATYYCHQISDLPTSTFGQGTKVEIK

SEQ ID NO: 279 - protein, 108 aa, Artificial Sequence
  source: /note="Description of Artificial Sequence: Synthetic polypeptide"
EIVLTQSPDFQSVTPKEKVTITCRASQRIGSNLHWYQQKPDQSPKLLIKYASQSISGVPSRFSGSGSGTDFTLTINSLEAEDAATYYCHQGSSLPPPTFGQGTKVEIK

SEQ ID NO: 280 - protein, 108 aa, Artificial Sequence
  source: /note="Description of Artificial Sequence: Synthetic polypeptide"
EIVLTQSPDFQSVTPKEKVTITCRASQCIGSSLHWYQQKPDQSPKLLIKHTSQSNSGVPSRFSGSGSGTDFTLTINSLEAEDAATYYCHQSNSSPLSTFGQGTKVEIK

SEQ ID NO: 281 - protein, 108 aa, Artificial Sequence
  source: /note="Description of Artificial Sequence: Synthetic polypeptide"
EIVLTQSPDFQSVTPKEKVTITCRASQNIGGSLHWYQQKPDQSPKLLIKYASQSISGVPSRFSGSGSGTDFTLTINSLEAEDAATYYCHQNSSLPLPTFGQGTKVEIK

SEQ ID NO: 282 - protein, 108 aa, Artificial Sequence
  source: /note="Description of Artificial Sequence: Synthetic polypeptide"
EIVLTQSPDFQSVTPKEKVTITCRASQSIGSRLHWYQQKPDQSPKLLIKYASQSISGVPSRFSGSGSGTDFTLTINSLEAEDAATYYCHQSSKSPPPTFGQGTKVEIK

SEQ ID NO: 283 - protein, 108 aa, Artificial Sequence
  source: /note="Description of Artificial Sequence: Synthetic polypeptide"
EIVLTQSPDFQSVTPKEKVTITCRASQSIGSCLHWYQQKPDQSPKLLIKYASQSVSGVPSRFSGSGSGTDFTLTINSLEAEDAATYYCHQRSSLPTPTFGQGTKVEIK

SEQ ID NO: 284 - protein, 108 aa, Artificial Sequence
  source: /note="Description of Artificial Sequence: Synthetic polypeptide"
EIVLTQSPDFQSVTPKEKVTITCRASQSIGGRLHWYQQKPDQSPKLLIKYASQSLSGVPSRFSGSGSGTDFTLTINSLEAEDAATYYCHQASSSPSTTFGQGTKVEIK

SEQ ID NO: 285 - protein, 108 aa, Artificial Sequence
  source: /note="Description of Artificial Sequence: Synthetic polypeptide"
EIVLTQSPDFQSVTPKEKVTITCRASQRIGPSLHWYQQKPDQSPKLLIKYASQSISGVPSRFSGSGSGTDFTLTINSLEAEDAATYYCHQNSCLPSTTFGQGTKVEIK

SEQ ID NO: 286 - protein, 108 aa, Artificial Sequence
  source: /note="Description of Artificial Sequence: Synthetic polypeptide"
EIVLTQSPDFQSVTPKEKVTITCRASQSIGRSLHWYQQKPDQSPKLLIKYASQSRSGVPSRFSGSGSGTDFTLTINSLEAEDAATYYCHQSGISPPTTFGQGTKVEIK

SEQ ID NO: 287 - protein, 108 aa, Artificial Sequence
  source: /note="Description of Artificial Sequence: Synthetic polypeptide"
EIVLTQSPDFQSVTPKEKVTITCRASQSIGTSLHWYQQKPDQSPKLLIKYVSQSISGVPSRFSGSGSGTDFTLTINSLEAEDAATYYCHQGMSSPAPTFGQGTKVEIK

SEQ ID NO: 288 - protein, 108 aa, Artificial Sequence
  source: /note="Description of Artificial Sequence: Synthetic polypeptide"
EIVLTQSPDFQSVTPKEKVTITCRASQSIGSSLHWYQQKPDQSPKLLIKYASQSLSGVPSRFSGSGSGTDFTLTINSLEAEDAATYYCHQRRNSPPPTFGQGTKVEIK

SEQ ID NO: 289 - protein, 108 aa, Artificial Sequence
  source: /note="Description of Artificial Sequence: Synthetic polypeptide"
EIVLTQSPDFQSVTPKEKVTITCRASQKIGSGLHWYQQKPDQSPKLLIKHASQSISGVPSRFSGSGSGTDFTLTINSLEAEDAATYYCHQNNSSPHKTFGQGTKVEIK

SEQ ID NO: 290 - protein, 108 aa, Artificial Sequence
  source: /note="Description of Artificial Sequence: Synthetic polypeptide"
EIVLTQSPDFQSVTPKEKVTITCRASQTIGSNLHWYQQKPDQSPKLLIKHSSQSISGVPSRFSGSGSGTDFTLTINSLEAEDAATYYCHQNSSSPLPTFGQGTKVEIK

SEQ ID NO: 291 - protein, 108 aa, Artificial Sequence
  source: /note="Description of Artificial Sequence: Synthetic polypeptide"
EIVLTQSPDFQSVTPKEKVTITCRASQNIGRSLHWYQQKPDQSPKLLIKYASQSSSGVPSRFSGSGSGTDFTLTINSLEAEDAATYYCHQSRSSPPPTFGQGTKVEIK

SEQ ID NO: 292 - protein, 108 aa, Artificial Sequence
  source: /note="Description of Artificial Sequence: Synthetic polypeptide"
EIVLTQSPDFQSVTPKEKVTITCRASQCIGKSLHWYQQKPDQSPKLLIKHPSQSVSGVPSRFSGSGSGTDFTLTINSLEAEDAATYYCHQSIGLPPTTFGQGTKVEIK

SEQ ID NO: 293 - protein, 108 aa, Artificial Sequence
  source: /note="Description of Artificial Sequence: Synthetic polypeptide"
EIVLTQSPDFQSVTPKEKVTITCRASQTIGSSLHWYQQKPDQSPKLLIKHASQSLSGVPSRFSGSGSGTDFTLTINSLEAEDAATYYCHQSSISPPATFGQGTKVEIK

SEQ ID NO: 294 - protein, 108 aa, Artificial Sequence
  source: /note="Description of Artificial Sequence: Synthetic polypeptide"
EIVLTQSPDFQSVTPKEKVTITCRASQSIGSTLHWYQQKPDQSPKLLIKYESQSISGVPSRFSGSGSGTDFTLTINSLEAEDAATYYCHQRCCSPTQTFGQGTKVEIK

SEQ ID NO: 295 - protein, 108 aa, Artificial Sequence
  source: /note="Description of Artificial Sequence: Synthetic polypeptide"
EIVLTQSPDFQSVTPKEKVTITCRASQSIGRKLHWYQQKPDQSPKLLIKYSSQSISGVPSRFSGSGSGTDFTLTINSLEAEDAATYYCHQSSRSPPTTFGQGTKVEIK

SEQ ID NO: 296 - protein, 108 aa, Artificial Sequence
  source: /note="Description of Artificial Sequence: Synthetic polypeptide"
EIVLTQSPDFQSVTPKEKVTITCRASQTIGTSLHWYQQKPDQSPKLLIKHASQSLSGVPSRFSGSGSGTDFTLTINSLEAEDAATYYCHQSSSSPSPTFGQGTKVEIK

SEQ ID NO: 297 - protein, 108 aa, Artificial Sequence
  source: /note="Description of Artificial Sequence: Synthetic polypeptide"
EIVLTQSPDFQSVTPKEKVTITCRASQSIGSSLHWYQQKPDQSPKLLIKHVSQSISGVPSRFSGSGSGTDFTLTINSLEAEDAATYYCHQRGSSPPRTFGQGTKVEIK

SEQ ID NO: 298 - protein, 108 aa, Artificial Sequence
  source: /note="Description of Artificial Sequence: Synthetic polypeptide"
EIVLTQSPDFQSVTPKEKVTITCRASQTIGSTLHWYQQKPDQSPKLLIKHTSQSISGVPSRFSGSGSGTDFTLTINSLEAEDAATYYCHQRSSSPPPTFGQGTKVEIK

SEQ ID NO: 299 - protein, 108 aa, Artificial Sequence
  source: /note="Description of Artificial Sequence: Synthetic polypeptide"
EIVLTQSPDFQSVTPKEKVTITCRASQSIGSNLHWYQQKPDQSPKLLIKHGSQSISGVPSRFSGSGSGTDFTLTINSLEAEDAATYYCHQRHSSPRATFGQGTKVEIK

SEQ ID NO: 300 - protein, 108 aa, Artificial Sequence
  source: /note="Description of Artificial Sequence: Synthetic polypeptide"
EIVLTQSPDFQSVTPKEKVTITCRASQKIGSNLHWYQQKPDQSPKLLIKYASQSFSGVPSRFSGSGSGTDFTLTINSLEAEDAATYYCHQNSSSPPATFGQGTKVEIK

SEQ ID NO: 301 - protein, 108 aa, Artificial Sequence
  source: /note="Description of Artificial Sequence: Synthetic polypeptide"
EIVLTQSPDFQSVTPKEKVTITCRASQSIGRSLHWYQQKPDQSPKLLIKYASQSISGVPSRFSGSGSGTDFTLTINSLEAEDAATYYCHQSSRSPFRTFGQGTKVEIK

SEQ ID NO: 302 - protein, 108 aa, Artificial Sequence
  source: /note="Description of Artificial Sequence: Synthetic polypeptide"
EIVLTQSPDFQSVTPKEKVTITCRASQCIGRRLHWYQQKPDQSPKLLIKHASQSRSGVPSRFSGSGSGTDFTLTINSLEAEDAATYYCHQCTSSPPPTFGQGTKVEIK

SEQ ID NO: 303 - protein, 108 aa, Artificial Sequence
  source: /note="Description of Artificial Sequence: Synthetic polypeptide"
EIVLTQSPDFQSVTPKEKVTITCRASQRIGSNLHWYQQKPDQSPKLLIKHASQSISGVPSRFSGSGSGTDFTLTINSLEAEDAATYYCHQSLRLPPQTFGQGTKVEIK

SEQ ID NO: 304 - protein, 108 aa, Artificial Sequence
  source: /note="Description of Artificial Sequence: Synthetic polypeptide"
EIVLTQSPDFQSVTPKEKVTITCRASQSIGSSLHWYQQKPDQSPKLLIKHASQSISGVPSRFSGSGSGTDFTLTINSLEAEDAATYYCHQNRSLPRLTFGQGTKVEIK

SEQ ID NO: 305 - protein, 108 aa, Artificial Sequence
  source: /note="Description of Artificial Sequence: Synthetic polypeptide"
EIVLTQSPDFQSVTPKEKVTITCRASQSIGSCLHWYQQKPDQSPKLLIKYASQSISGVPSSSVASGSGTDFTLTINSLEAEDAATYYCHQRSSLPQPTFGQGTKVEIK

SEQ ID NO: 306 - protein, 108 aa, Artificial Sequence
  source: /note="Description of Artificial Sequence: Synthetic polypeptide"
EIVLTQSPDFQSVTPKEKVTITCRASQSIGRRLHWYQQKPDQSPKLLIKHPSQSVSGVPSRFSGSGSGTDFTLTINSLEAEDAATYYCHQSIDSPPPTFGQGTKVEIK

SEQ ID NO: 307 - protein, 108 aa, Artificial Sequence
  source: /note="Description of Artificial Sequence: Synthetic polypeptide"
EIVLTQSPDFQSVTPKEKVTITCRASQTIGRSLHWYQQKPDQSPKLLIKYKSQSSSGVPSRFSGSGSGTDFTLTINSLEAEDAATYYCHQRWGLPMPTFGQGTKVEIK

SEQ ID NO: 308 - protein, 108 aa, Artificial Sequence
  source: /note="Description of Artificial Sequence: Synthetic polypeptide"
EIVLTQSPDFQSVTPKEKVTITCRASQRIGSMLHWYQQKPDQSPKLLIKHSSQSISGVPSRFSGSGSGTDFTLTINSLEAEDAATYYCHQTNSLPPRTFGQGTKVEIK

SEQ ID NO: 309 - protein, 108 aa, Artificial Sequence
  source: /note="Description of Artificial Sequence: Synthetic polypeptide"
EIVLTQSPDFQSVTPKEKVTITCRASQSIGRSLHWYQQKPDQSPKLLIKHASQSISGVPSRFSGSGSGTDFTLTINSLEAEDAATYYCHQGSRSPLDTFGQGTKVEIK

SEQ ID NO: 310 - protein, 108 aa, Artificial Sequence
  source: /note="Description of Artificial Sequence: Synthetic polypeptide"
EIVLTQSPDFQSVTPKEKVTITCRASQSIGCSLHWYQQKPDQSPKLLIKYASQSVSVVPSRFSGSGSGTDFTLTINSLEAEDAATYYCHQSSTLPPPTFGQGTKVEIK

SEQ ID NO: 311 - protein, 108 aa, Artificial Sequence
  source: /note="Description of Artificial Sequence: Synthetic polypeptide"
EIVLTQSPDFQSVTPKEKVTITCRASQGIGTSLHWYQQKPDQSPKLLIKHDSQSISGVPSRFSGSGSGTDFTLTINSLEAEDAATYYCHQTSSLPPPTFGQGTKVEIK

SEQ ID NO: 312 - protein, 108 aa, Artificial Sequence
  source: /note="Description of Artificial Sequence: Synthetic polypeptide"
EIVLTQSPDFQSVTPKEKVTITCRASQIIGSSLHWYQQKPDQSPKLLIKHASQSISGVPSRFSGSGSGTDFTLTINSLEAEDAATYYCHQSSSLPLPTFGQGTKVEIK

SEQ ID NO: 313 - protein, 108 aa, Artificial Sequence
  source: /note="Description of Artificial Sequence: Synthetic polypeptide"
EIVLTQSPDFQSVTPKEKVTITCRASQSIGSSLHWYQQKPDQSPKLLIKYTSQSKSGVPSRFSGSGSGTDFTLTINSLEAEDAATYYCHQGNRSPSTTFGQGTKVEIK

SEQ ID NO: 314 - protein, 108 aa, Artificial Sequence
  source: /note="Description of Artificial Sequence: Synthetic polypeptide"
EIVLTQSPDFQSVTPKEKVTITCRASKRIGSSLHWYQQKPDQSPKLLIKHKSQSISGVPSRFSGSGSGTDFTLTINSLEAEDAATYYCHQRSASPPPTFGQGTKVEIK

SEQ ID NO: 315 - protein, 108 aa, Artificial Sequence
  source: /note="Description of Artificial Sequence: Synthetic polypeptide"
EIVLTQSPDFQSVTPKEKVTITCRASQTIGSSLHWYQQKPDQSPKLLIKHPSQSMSGVPSRFSGSGSGTDFTLTINSLEAEDAATYYCHQSSTSPPATFGQGTKVEIK

SEQ ID NO: 316 - protein, 108 aa, Artificial Sequence
  source: /note="Description of Artificial Sequence: Synthetic polypeptide"
EIVLTQSPDFQSVTPKEKVTITCRASQSIGSSLHWYQQKPDQSPKLLIKHASQSISGVPSRFSGSGSGTDFTLTINSLEAEDAATYYCHQRSSLPTPTFGQGTKVEIK

SEQ ID NO: 317 - protein, 108 aa, Artificial Sequence
  source: /note="Description of Artificial Sequence: Synthetic polypeptide"
EIVLTQSPDFQSVTPKEKVTITCRASQSIGSTLHWYQQKPDQSPKLLIKHASQSFSGVPSRFSGSGSGTDFTLTINSLEAEDAATYYCHQSNCSPAHTFGQGTKVEIK

SEQ ID NO: 318 - protein, 108 aa, Artificial Sequence
  source: /note="Description of Artificial Sequence: Synthetic polypeptide"
EIVLTQSPDFQSVTPKEKVTITCRASQTIGSRLHWYQQKPDQSPKLLIKYVSQSISGVPSRFSGSGSGTDFTLTINSLEAEDAATYYCHQGSRLPPPTFGQGTKVEIK

SEQ ID NO: 319 - protein, 108 aa, Artificial Sequence
  source: /note="Description of Artificial Sequence: Synthetic polypeptide"
EIVLTQSPDFQSVTPKEKVTITCRASQRIGSTLHWYQQKPDQSPKLLIKHASQSNSGVPSRFSGSGSGTDFTLTINSLEAEDAATYYCHQSSCSPQATFGQGTKVEIK

SEQ ID NO: 320 - protein, 108 aa, Artificial Sequence
  source: /note="Description of Artificial Sequence: Synthetic polypeptide"
EIVLTQSPDFQSVTPKEKVTITCRASQSIGTSLHWYQQKPDQSPKLLIKYPSQSISGVPSRFSGSGSGTDFTLTINSLEAEDAATYYCHQSGRSPPHTFGQGTKVEIK

SEQ ID NO: 321 - protein, 108 aa, Artificial Sequence
  source: /note="Description of Artificial Sequence: Synthetic polypeptide"
EIVLTQSPDFQSVTPKEKVTITCRASQSIGSSLHWYQQKPDQSPKLLIKHASQSISGVPSRFSGSGSGTDFTLTINSLEAEDAATYYCHQNSILPPPTFGQGTKVEIK

SEQ ID NO: 322 - protein, 108 aa, Artificial Sequence
  source: /note="Description of Artificial Sequence: Synthetic polypeptide"
EIVLTQSPDFQSVTPKEKVTITCRASQCIGSYLHWYQQKPDQSPKLLIKHVSQSISGVPSRFSGSGSGTDFTLTINSLEAEDAATYYCHQSSSSPTLTFGQGTKVEIK

SEQ ID NO: 323 - protein, 108 aa, Artificial Sequence
  source: /note="Description of Artificial Sequence: Synthetic polypeptide"
EIVLTQSPDFQSVTPKEKVTITCRASQSIGSSLHWYQQKPDQSPKLLIKHASQSMSGVPSGFSGSGSGTDFTLTINSLEAEDAATYYCHQTNRSPPPTFGQGTKVEIK

SEQ ID NO: 324 - protein, 108 aa, Artificial Sequence
  source: /note="Description of Artificial Sequence: Synthetic polypeptide"
EIVLTQSPDFQSVTPKEKVTITCRASQNIGTSLHWYQQKPDQSPKLLIKYVSQSISGVPSRFSGSGSGTDFTLNINSLEAEDAATYYCHQSSCLPRPTFGQGTKVEIK

SEQ ID NO: 325 - protein, 108 aa, Artificial Sequence
  source: /note="Description of Artificial Sequence: Synthetic polypeptide"
EIVLTQSPDFQSVTPKEKVTITCRASQSIGSPLHWYQQKPDQSPKLLIKYASQSISGVPSRFSGSGSGTDFTLTINSLEAEDAATYYCHQGSSSPPPTFGQGTKVEIK

SEQ ID NO: 326 - protein, 108 aa, Artificial Sequence
  source: /note="Description of Artificial Sequence: Synthetic polypeptide"
EIVLTQSPDFQSVTPKEKVTITCRASQSIGSTLHWYQQKPDQSPKLLIKHDSQSKSGVPSRFSGSGSGTDFTLTINSLEAEDAATYYCHQSSDSPAPTFGQGTKVEIK

SEQ ID NO: 327 - protein, 108 aa, Artificial Sequence
  source: /note="Description of Artificial Sequence: Synthetic polypeptide"
EIVLTQSPDFQSVTPKEKVTITCRASQSIGSCLHWYQQKPDQSPKLLIKHASQSNSGVPSRFSGSGSGTDFTLTINSLEAEDAATYYCHQSRISPLPTFGQGTKVEIK

SEQ ID NO: 328 - protein, 108 aa, Artificial Sequence
  source: /note="Description of Artificial Sequence: Synthetic polypeptide"
EIVLTQSPDFQSVTPKEKVTITCRASQSIGRRLHWYQQKPDQSPKLLIKHSSQSISGVPSRFSGSGSGTDFTLTINSLEAEDAATYYCHQCSSLPHPTFGQGTKVEIK

SEQ ID NO: 329 - protein, 108 aa, Artificial Sequence
  source: /note="Description of Artificial Sequence: Synthetic polypeptide"
EIVLTQSPDFQSVTPKEKVTITCRASQRIGSRLHWYQQKPDQSPKLLIKHASQSTSGVPSRFSGSGSGTDFTLTINSLEAEDAATYYCHQSCSSPLVTFGQGTKVEIK

SEQ ID NO: 330 - protein, 108 aa, Artificial Sequence
  source: /note="Description of Artificial Sequence: Synthetic polypeptide"
EIVLTQSPDFQSVTPKEKVTITCRASQSIGSRLHWYQQKPDQSPKLLIKHASQSSSGVPSRFSGSGSGTDFTLTINSLEAEDAATYYCHQSGSSPQATFGQGTKVEIK

SEQ ID NO: 331 - protein, 108 aa, Artificial Sequence
  source: /note="Description of Artificial Sequence: Synthetic polypeptide"
EIVLTQSPDFQSVTPKEKVTITCRASQSIGSSLHWYQQKPDQSPKLLIKHASQSVSGVPSRFSGSGSGTDFTLTINSLEAEDAATYYCHQNRGSPPQTFGQGTKVEIK

SEQ ID NO: 332 - protein, 108 aa, Artificial Sequence
  source: /note="Description of Artificial Sequence: Synthetic polypeptide"
EIVLTQSPDFQSVTPKEKVTITCRASQTIGSILHWYQQKPDQSPKLLIKHASQSISGVPSRFSGSGSGTDFTLTINSLEAEDAATYYCHQNTSLPPPTFGQGTKVEIK

SEQ ID NO: 333 - protein, 108 aa, Artificial Sequence
  source: /note="Description of Artificial Sequence: Synthetic polypeptide"
EIVLTQSPDFQSVTPKEKVTITCRASQSIGNSLHWYQQKPDQSPKLLIKYPSQSISGVPSRFSGSGSGTDFTLTINSLEAEDAATYYCHQGSRLPVPTFGQGTKVEIK

SEQ ID NO: 334 - protein, 108 aa, Artificial Sequence
  source: /note="Description of Artificial Sequence: Synthetic polypeptide"
EIVLTQSPDFQSVTPKEKVTITCRASQSIGSRLHWYQQKPDQSPKLLIKHTSQSNSGVPSRFSGSGSGTDFTLTINSLEAEDAATYYCHQSSSLPAPTFGQGTKVEIK

SEQ ID NO: 335 - protein, 108 aa, Artificial Sequence
  source: /note="Description of Artificial Sequence: Synthetic polypeptide"
EIVLTQSPDFQSVTPKEKVTITCRASQNIGSSLHWYQQKPDQSPKLLIKHVSQSISGVPSRFSGSGSGTDFTLTINSLEAEDAATYYCHQSNSLPAPTFGQGTKVEIK

SEQ ID NO: 336 - protein, 108 aa, Artificial Sequence
  source: /note="Description of Artificial Sequence: Synthetic polypeptide"
EIVLTQSPDFQSVTPKEKVTITCRASQSIGSSLHWYQQKPDQSPKLLIKHASQSISGVPSRFSGSGSGTDFTLTINSLEAEDAATYYCHQSMSLPSATFGQGTKVEIK

SEQ ID NO: 337 - protein, 108 aa, Artificial Sequence
  source: /note="Description of Artificial Sequence: Synthetic polypeptide"
EIVLTQSPDFQSVTPKEKVTITCRASQRIGSSLHWYQQKPDQSPKLLIKHLSQSISGVPSRFSGSGSGTDFTLTINSLEAEDAATYYCHQPCRLPPSTFGQGTKVEIK

SEQ ID NO: 338 - protein, 108 aa, Artificial Sequence
  source: /note="Description of Artificial Sequence: Synthetic polypeptide"
EIVLTQSPDFQSVTPKEKVTITCRASQSIGSLLHWYQQKPDQSPKLLIKHASQSISGVPSRFSGSGSGTDFTLTINSLEAEDAATYYCHQSCSSPRHTFGQGTKVEIK

SEQ ID NO: 339 - protein, 108 aa, Artificial Sequence
  source: /note="Description of Artificial Sequence: Synthetic polypeptide"
EIVLTQSPDFQSVTPKEKVTITCRASQRIGSSLHWYQQKPDQSPKLLIKHPSQSKSGVPSRFSGSGSGTDFTLTINSLEAEDAATYYCHQSSRSPAPTFGQGTKVEIK

SEQ ID NO: 340 - protein, 108 aa, Artificial Sequence
  source: /note="Description of Artificial Sequence: Synthetic polypeptide"
EIVLTQSPDFQSVTPKEKVTITCRASQSIGGSLHWYQQKPDQSPKLLIKYSSQSLSGVPSRFSGSGSGTDFTLTINSLEAEDAATYYCHQSSILPSLTFGQGTKVEIK

SEQ ID NO: 341 - protein, 108 aa, Artificial Sequence
  source: /note="Description of Artificial Sequence: Synthetic polypeptide"
EIVLTQSPDFQSVTPKEKVTITCRASQSIGSSLHWYQQKPDQSPKLLIKHPSQSISGVPSRFSGSGSGTDFTLTINSLEAEDAATYYCHQSRNLPPRTFGQGTKVEIK

SEQ ID NO: 342 - protein, 108 aa, Artificial Sequence
  source: /note="Description of Artificial Sequence: Synthetic polypeptide"
EIVLTQSPDFQSVTPKEKVTITCRASQSIGSILHWYQQKPDQSPKLLIKYGSQSLSGVPSRFSGSGSGTDFTLTINSLEAEDAATYYCHQNGSSPPRTFGQGTKVEIK

SEQ ID NO: 343 - protein, 108 aa, Artificial Sequence
  source: /note="Description of Artificial Sequence: Synthetic polypeptide"
EIVLTQSPDFQSVTPKEKVTITCRASQSIGSSLHWYQQKPDQSPKLLIKYFSQSISGVPSRFSGSGSGTDFTLTINSLEAEDAATYYCHQNSCLPMQTFGQGTKVEIK

SEQ ID NO: 344 - protein, 108 aa, Artificial Sequence
  source: /note="Description of Artificial Sequence: Synthetic polypeptide"
EIVLTQSPDFQSVTPKEKVTITCRASQNIGSSLHWYQQKPDQSPKLLIKYSSQSVSGVPSRFSGSGSGTDFTLTINSLEAEDAATYYCHQSSISPPATFGQGTKVEIK

SEQ ID NO: 345 - protein, 108 aa, Artificial Sequence
  source: /note="Description of Artificial Sequence: Synthetic polypeptide"
EIVLTQSPDFQSVTPKEKVTITCRASQCIGSSLHWYQQKPDQSPKLLIKHASQSNSGVPSRFSGSGSGTDFTLTINSLEAEDAATYYCHQSTCLPPRTFGQGTKVEIK

SEQ ID NO: 346 - protein, 108 aa, Artificial Sequence
  source: /note="Description of Artificial Sequence: Synthetic polypeptide"
EIVLTQSPDFQSVTPKEKVTITCRASQSIGSRLHWYQQKPDQSPKLLIKYVSQSMSGVLSRFSGSGSGTDFTLTINSLEAEDAATYYCHQPSTSPRPTFGQGTKVEIK

SEQ ID NO: 347 - protein, 108 aa, Artificial Sequence
  source: /note="Description of Artificial Sequence: Synthetic polypeptide"
EIVLTQSPDFQSVTPKEKVTITCRASQSIGSRLHWYQQKPDQSPKLLIKHASQSISGVPSRFSGSGSGTDFTLTINSLEAEDAATYYCHQNSSLPPSTFGQGTKVEIK

SEQ ID NO: 348 - protein, 108 aa, Artificial Sequence
  source: /note="Description of Artificial Sequence: Synthetic polypeptide"
EIVLTQSPDFQSVTPKEKVTITCRASQSIGCSLHWYQQKPDQSPKLLIKYASQSNSGVPSRFSGSGSGTDFTLTINSLEAEDAATYYCHQSSSSPSSTFGQGTKVEIK

SEQ ID NO: 349 - protein, 108 aa, Artificial Sequence
  source: /note="Description of Artificial Sequence: Synthetic polypeptide"
EIVLTQSPDFQSVTPKEKVTITCRASQIIGTSLHWYQQKPDQSPKLLIKYASQSISGVPSRFSGSGSGTDFTLTINSLEAEDAATYYCHQSSRSPPRTFGQGTKVEIK

SEQ ID NO: 350 - protein, 108 aa, Artificial Sequence
  source: /note="Description of Artificial Sequence: Synthetic polypeptide"
EIVLTQSPDFQSVTPKEKVTITCRASQKIGTSLHWYQQKPDQSPKLLIKHESQSISGVPSRFSGSGSGTDFTLTINSLEAEDAATYYCHQSSGSPPPTFGQGTKVEIK

SEQ ID NO: 351 - protein, 108 aa, Artificial Sequence
  source: /note="Description of Artificial Sequence: Synthetic polypeptide"
EIVLTQSPDFQSVTPKEKVTITCRASQTIGGSLHWYQQKPDQSPKLLIKHVSQSVSGVPSRFSGSGSGTDFTLTINSLEAEDAATYYCHQSSISPPPTFGQGTKVEIK

SEQ ID NO: 352 - protein, 108 aa, Artificial Sequence
  source: /note="Description of Artificial Sequence: Synthetic polypeptide"
EIVLTQSPDFQSVTPKEKVTITCRASQSIGSDLHWYQQKPDQSPKLLIKHVSQSVSGVPSRFSGSGSGTDFTLTINSLEAEDAATYYCHQSCMSPSLTFGQGTKVEIK

SEQ ID NO: 353 - protein, 108 aa, Artificial Sequence
  source: /note="Description of Artificial Sequence: Synthetic polypeptide"
EIVLTQSPDFQSVTPKEKVTITCRASQSIGSNLHWYQQKPDQSPKLLIKHASQSISGVPSRFSGSGSGTDFTLTINSLEAEDAATYYCHQSSSLPNTTFGQGTKVEIK

SEQ ID NO: 354 - protein, 108 aa, Artificial Sequence
  source: /note="Description of Artificial Sequence: Synthetic polypeptide"
EIVLTQSPDFQSVTPKEKVTITCRASQRIGSILHWYQQKPDQSPKLLIKHASQSISGVPSRFSGSGSGTDFTLTINSLEAEDAATYYCHQGRISPSSTFGQGTKVEIK

SEQ ID NO: 355 - protein, 108 aa, Artificial Sequence
  source: /note="Description of Artificial Sequence: Synthetic polypeptide"
EIVLTQSPDFQSVTPKEKVTITCRASQSIGNRLHWYQQKPDQSPKLLIKHASQSLSGVPSRFSGSGSGTDFTLTINSLEAEDAATYYCHQSGSLPTLTFGQGTKVEIK

SEQ ID NO: 356 - protein, 108 aa, Artificial Sequence
  source: /note="Description of Artificial Sequence: Synthetic polypeptide"
EIVLTQSPDFQSVTPKEKVTITCRASQTIGSSLHWYQQKPDQSPKLLIKHDSQSLSGVPSRFSGSGSGTDFTLTINSLEAEDAATYYCHQNSSLPTHTFGQGTKVEIK

SEQ ID NO: 357 - protein, 108 aa, Artificial Sequence
  source: /note="Description of Artificial Sequence: Synthetic polypeptide"
EIVLTQSPDFQSVTPKEKVTITCRASQTIGRSLHWYQQKPDQSPKLLIKHGSQSISGVPSRFSGSGSGTDFTLTINSLEAEDAATYYCHQSRSSPPSTFGQGTKVEIK

SEQ ID NO: 358 - protein, 108 aa, Artificial Sequence
  source: /note="Description of Artificial Sequence: Synthetic polypeptide"
EIVLTQSPDFQSVTPKEKVTITCRASQSIGSSLHWYQQKPDQSPKLLIKYASQSISGVPSRFSGSGSGTDFTLTINSLEAEDAATYYCHQNCSSPPPTFGQGTKVEIK

SEQ ID NO: 359 - protein, 108 aa, Artificial Sequence
  source: /note="Description of Artificial Sequence: Synthetic polypeptide"
EIVLTQSPDFQSVTPKEKVTITCRASQSIGSSLHWYQQKPDQSPKLLIKYESQSDSGVPSRFSGSGSGTDFTLTINSLEAEDAATYYCHQRRNSPPSTFGQGTKVEIK

SEQ ID NO: 360 - protein, 108 aa, Artificial Sequence
  source: /note="Description of Artificial Sequence: Synthetic polypeptide"
EIVLTQSPDFQSVTPKEKVTITCRASQGIGSRLHWYQQKPDQSPKLLIKHGSQSISGVPSRFSGSGSGTDFTLTINSLEAEDAATYYCHQNRGLPAPTFGQGTKVEIK

SEQ ID NO: 361 - protein, 108 aa, Artificial Sequence
  source: /note="Description of Artificial Sequence: Synthetic polypeptide"
EIVLTQSPDFQSVTPKEKVTITCRASQSIGSSLHWYQQKPDQSPKLLIKYASQSSSGVPSRFSGSGSGTDFTLTINSLEAEDAATYYCHQNHTSPPPTFGQGTKVEIK

SEQ ID NO: 362 - protein, 108 aa, Artificial Sequence
  source: /note="Description of Artificial Sequence: Synthetic polypeptide"
EIVLTQSPDFQSVTPKEKVTITCRASQSIGSRLHWYQQKPDQSPKLLIKHASQSVSGVPSRFSGSGSGTDFTLTINSLEAEDAATYYCHQSGRLPPPTFGQGTKVEIK

SEQ ID NO: 363 - protein, 108 aa, Artificial Sequence
  source: /note="Description of Artificial Sequence: Synthetic polypeptide"
EIVLTQSPDFQSVTPKEKVTITCRASQYIGKRLHWYQQKPDQSPKLLIKYASQSISGVPSRFSGSGSGTDFTLTINSLEAEDAATYYCHQSNISPPPTFGQGTKVEIK

SEQ ID NO: 364 - protein, 108 aa, Artificial Sequence
  source: /note="Description of Artificial Sequence: Synthetic polypeptide"
EIVLTQSPDFQSVTPKEKVTITCRASQRIGSSLHWYQQKPDQSPKLLIKHESQSISGVPSRFSGSGSGTDFTLTINSLEAEDAATYYCHQSSSLPPPTFGQGTKVEIK

SEQ ID NO: 365 - protein, 108 aa, Artificial Sequence
  source: /note="Description of Artificial Sequence: Synthetic polypeptide"
EIVLTQSPDFQSVTPKEKVTITCRASQTIGSSLHWYQQKPDQSPKLLIKYASQSISGVPSRFSGSGSGTDFTLTINSLEAEDAATYYCHQRSSLPPSTFGQGTKVEIK

SEQ ID NO: 366 - protein, 108 aa, Artificial Sequence
  source: /note="Description of Artificial Sequence: Synthetic polypeptide"
EIVLTQSPDFQSVTPKEKVTITCRASQSIGRSLHWYQQKPDQSPKLLIKHPSQSISGVPSRFSGSGSGTDFTLTINSLEAEDAATYYCHQCSSSPAQTFGQGTKVEIK

SEQ ID NO: 367 - protein, 108 aa, Artificial Sequence
  source: /note="Description of Artificial Sequence: Synthetic polypeptide"
EIVLTQSPDFQSVTPKEKVTITCRASQSIGRSLHWYQQKPDQSPKLLIKHTSQSLSGVPSRFSGSGSGTDFTLTINSLEAEDAATYYCHQRSSLPLPTFGQGTKVEIK

SEQ ID NO: 368 - protein, 108 aa, Artificial Sequence
  source: /note="Description of Artificial Sequence: Synthetic polypeptide"
EIVLTQSPDFQSVTPKEKVTITCRASQWIGSSLHWYQQKPDQSPKLLIKHTSQSISGVPSRFSGSGSGTDFTLTINSLEAEDAATYYCHQSSSLPPQTFGQGTKVEIK

SEQ ID NO: 369 - protein, 108 aa, Artificial Sequence
  source: /note="Description of Artificial Sequence: Synthetic polypeptide"
EIVLTQSPDFQSVTPKEKVTITCRASQSIGRSLHWYQQKPDQSPKLLIKYSSQSISGVPSRFSGSGSGTDFTLTINSLEAEDAATYYCHQGSSSPPPTFGQGTKVEIK

SEQ ID NO: 370 - protein, 108 aa, Artificial Sequence
  source: /note="Description of Artificial Sequence: Synthetic polypeptide"
EIVLTQSPDFQSVTPKEKVTITCRASQSIGSSLHWYQQKPDQSPKLLIKHASQSISGVPSRFSGSGSGTDFTLTINSLEAEDAATYYCHQSSRLPPSTFGQGTKVEIK

SEQ ID NO: 371 - protein, 108 aa, Artificial Sequence
  source: /note="Description of Artificial Sequence: Synthetic polypeptide"
EIVLTQSPDFQSVTPKEKVTITCRASQSIGSSLHWYQQKPDQSPKLLIKYGSQSISGVPSRFSGSGSGTDFTLTINSLEAEDAATYYCHQNWSLPLPTFGQGTKVEIK

SEQ ID NO: 372 - protein, 108 aa, Artificial Sequence
  source: /note="Description of Artificial Sequence: Synthetic polypeptide"
EIVLTQSPDFQSVTPKEKVTITCRASQRIGTSLHWYQQKPDQSPKLLIKYASQSKSGVPSRFSGSGSGTDFTLTINSLEAEDAATYYCHQSSCSPTPTFGQGTKVEIK

SEQ ID NO: 373 - protein, 108 aa, Artificial Sequence
  source: /note="Description of Artificial Sequence: Synthetic polypeptide"
EIVLTQSPDFQSVTPKEKVTITCRASQSIGGSLHWYQQKPDQSPKLLIKYGSQSISGVPSRFSGSGSGTDFTLTINSLEAEDAATYYCHQRCVSPSPTFGQGTKVEIK

SEQ ID NO: 374 - protein, 108 aa, Artificial Sequence
  source: /note="Description of Artificial Sequence: Synthetic polypeptide"
EIVLTQSPDFQSVTPKEKVTITCRASQSIGGTLHWYQQKPDQSPKLLIKYASQSISGVPSRFSGSGSGTDFTLTINSLEAEDAATYYCHQSSSSPARTFGQGTKVEIK

SEQ ID NO: 375 - protein, 108 aa, Artificial Sequence
  source: /note="Description of Artificial Sequence: Synthetic polypeptide"
EIVLTQSPDFQSVTPKEKVTITCRASQSIGSSLHWYQQKPDQSPKLLIKYASQSISGVPSRFSGSGSGTDFTLTINSLEAEDAATYYCHQCGSSPLHTFGQGTKVEIK

SEQ ID NO: 376 - protein, 108 aa, Artificial Sequence
  source: /note="Description of Artificial Sequence: Synthetic polypeptide"
EIVLTQSPDFQSVTPKEKVTITCRASQSIGTSLHWYQQKPDQSPKLLIKHPSQSLSGVPSRFSGSGSGTDFTLTINSLEAEDAATYYCHQSTSSPPPTFGQGTKVEIK

SEQ ID NO: 377 - protein, 108 aa, Artificial Sequence
  source: /note="Description of Artificial Sequence: Synthetic polypeptide"
EIVLTQSPDFQSVTPKEKVTITCRASQNIGSSLHWYQQKPDQSPKLLIKHASQSISGVPSRFSGSGSGTDFTLTINSLEAEDAATYYCHQNSGLPLPTFGQGTKVEIK

SEQ ID NO: 378 - protein, 108 aa, Artificial Sequence
  source: /note="Description of Artificial Sequence: Synthetic polypeptide"
EIVLTQSPDFQSVTPKEKVTITCRASQSIGRRLHWYQQKPDQSPKLLIKYASQSISGVPSRFSGSGSGTDFTLTINSLEAEDAATYYCHQGSSSPSPTFGQGTKVEIK

SEQ ID NO: 379 - protein, 108 aa, Artificial Sequence
  source: /note="Description of Artificial Sequence: Synthetic polypeptide"
EIVLTQSPDFQSVTPKEKVTITCRASQRIGGNLHWYQQKPDQSPKLLIKHESQSNSGVPSRFSGSGSGTDFTLTINSLEAEDAATYYCHQSSSLPSHTFGQGTKVEIK

SEQ ID NO: 380 - protein, 108 aa, Artificial Sequence
  source: /note="Description of Artificial Sequence: Synthetic polypeptide"
EIVLTQSPDFQSVTPKEKVTITCRASQSIGSSLHWYQQKPDQSPKLLIKYASQSTSGVPSRFSGSGSGTDFTLTINSLEAEDAATYYCHQCSSSPSHTFGQGTKVEIK

SEQ ID NO: 381 - protein, 108 aa, Artificial Sequence
  source: /note="Description of Artificial Sequence: Synthetic polypeptide"
EIVLTQSPDFQSVTPKEKVTITCRASQSIGSSLHWYQQKPDQSPKLLIKHASQSMSGVPSRFSGSGSGTDFTLTINSLEAEDAATYYCHQSRNSPPTTFGQGTKVEIK

SEQ ID NO: 382 - protein, 108 aa, Artificial Sequence
  source: /note="Description of Artificial Sequence: Synthetic polypeptide"
EIVLTQSPDFQSVTPKEKVTITCRASQRIGSRLHWYQQKPDQSPKLLIKHGSQSISGVPSRFSGSGSGTDFTLTINSLEAEDAATYYCHQNSSSPPPTFGQGTKVEIK

SEQ ID NO: 383 - protein, 108 aa, Artificial Sequence
  source: /note="Description of Artificial Sequence: Synthetic polypeptide"
EIVLTQSPDFQSVTPKEKVTITCRASQNIGSSLHWYQQKPDQSPKLLIKYASQSLSGVPSRFSGSGSGTDFTLTINSLEAEDAATYYCHQSSLLPAPTFGQGTKVEIK

SEQ ID NO: 384 - protein, 108 aa, Artificial Sequence
  source: /note="Description of Artificial Sequence: Synthetic polypeptide"
EIVLTQSPDFQSVTPKEKVTITCRASQIIGTTLHWYQQKPDQSPKLLIKHASQSISGVPSRFSGSGSGTDFTLTINSLEAEDAATYYCHQNSNLPPSTFGQGTKVEIK

SEQ ID NO: 385 - protein, 108 aa, Artificial Sequence
  source: /note="Description of Artificial Sequence: Synthetic polypeptide"
EIVLTQSPDFQSVTPKEKVTITCRASQNIGGNLHWYQQKPDQSPKLLIKHASQSLSGVPSRFSGSGSGTDFTLTINSLEAEDAATYYCHQSSNLPPPTFGQGTKVEIK

SEQ ID NO: 386 - protein, 108 aa, Artificial Sequence
  source: /note="Description of Artificial Sequence: Synthetic polypeptide"
EIVLTQSPDFQSVTPKEKVTITCRASQGIGGSLHWYQQKPDQSPKLLIKYASQSTSGVPSRFSGSGSGTDFTLTINSLEAEDAATYYCHQSACLPTRTFGQGTKVEIK

SEQ ID NO: 387 - protein, 108 aa, Artificial Sequence
  source: /note="Description of Artificial Sequence: Synthetic polypeptide"
EIVLTQSPDFQSVTPKEKVTITCRASQSIGTSLHWYQQKPDQSPKLLIKYASQSVSGVPSRFSGSGSGTDFTLTINSLEAEDAATYYCHQIGSLPPPTFGQGTKVEIK

SEQ ID NO: 388 - protein, 108 aa, Artificial Sequence
  source: /note="Description of Artificial Sequence: Synthetic polypeptide"
EIVLTQSPDFQSVTPKEKVTITCRASQSIGRSLHWYQQKPDQSPKLLIKHASQSVSGVPSRFSGSGSGTDFTLTINSLEAEDAATYYCHQNSRLPPPTFGQGTKVEIK

SEQ ID NO: 389 - protein, 108 aa, Artificial Sequence
  source: /note="Description of Artificial Sequence: Synthetic polypeptide"
EIVLTQSPDFQSVTPKEKVTITCRASQSIGSSLHWYQQKPDQSPKLLIKHNSQSISGVPSRFSGSGSGTDFTLTINSLEAEDAATYYCHQRSSSPPLTFGQGTKVEIK

SEQ ID NO: 390 - protein, 108 aa, Artificial Sequence
  source: /note="Description of Artificial Sequence: Synthetic polypeptide"
EIVLTQSPDFQSVTPKEKVTITCRASQSIGRNLHWYQQKPDQSPKLLIKHVSQSISGVPSRFSGSGSGTDFTLTINSLEAEDAATYYCHQRSRSPPSTFGQGTKVEIK

SEQ ID NO: 391 - protein, 108 aa, Artificial Sequence
  source: /note="Description of Artificial Sequence: Synthetic polypeptide"
EIVLTQSPDFQSVTPKEKVTITCRASQSIGSSLHWYQQKPDQSPKLLIKHASQSVSGVPSRFSGSGSGTDFTLTINSLEAEDAATYYCHQCSSLPAPTFGQGTKVEIK

SEQ ID NO: 392 - protein, 108 aa, Artificial Sequence
  source: /note="Description of Artificial Sequence: Synthetic polypeptide"
EIVLTQSPDFQSVTPKEKVTITCRASQRIGSSLHWYQQKPDQSPKLLIKHASQSLSGVPSRFSGSGSGTDFTLTINSLEAEDAATYYCHQSSRLPPQTFGQGTKVEIK

SEQ ID NO: 393 - protein, 108 aa, Artificial Sequence
  source: /note="Description of Artificial Sequence: Synthetic polypeptide"
EIVLTQSPDFQSVTPKEKVTITCRASQCIGSRLHWYQQKPDQSPKLLIKYASQSISGVPSRFSGSGSGTDFTLTINSLEAEDAATYYCHQRGRLPPRTFGQGTKVEIK

SEQ ID NO: 394 - protein, 108 aa, Artificial Sequence
  source: /note="Description of Artificial Sequence: Synthetic polypeptide"
EIVLTQSPDFQSVTPKEKVTITCRASQSIGSSLHWYQQKPDQSPKLLIKYASQSISGVPSRFSGSGSGTDFTLTINSLEAEDAATYYCHQSTSLPRLTFGQGTKVEIK

SEQ ID NO: 395 - protein, 108 aa, Artificial Sequence
  source: /note="Description of Artificial Sequence: Synthetic polypeptide"
EIVLTQSPDFQSVTPKEKVTITCRASQIIGSSLHWYQQKPDQSPKLLIKYASQSISGVPSRFSGSGSGTDFTLTINSLEAEDAATYYCHQSRSSPQQTFGQGTKVEIK

SEQ ID NO: 396 - protein, 108 aa, Artificial Sequence
  source: /note="Description of Artificial Sequence: Synthetic polypeptide"
EIVLTQSPDFQSVTPKEKVTITCRASQSIGSTLHWYQQKPDQSPKLLIKHASQSISGVPSRFSGSGSGTDFTLTINSLEAEDAATYYCHQSSSLPPPTFGQGTKVEIK

SEQ ID NO: 397 - protein, 108 aa, Artificial Sequence
  source: /note="Description of Artificial Sequence: Synthetic polypeptide"
EIVLTQSPDFQSVTPKEKVTITCRASQSIGNSLHWYQQKPDQSPKLLIKHGSQSISGVPSRFSGSGSGTDFTLTINSLEAEDAATYYCHQRRSSPRHTFGQGTKVEIK

SEQ ID NO: 398 - protein, 108 aa, Artificial Sequence
  source: /note="Description of Artificial Sequence: Synthetic polypeptide"
EIVLTQSPDFQSVTPKEKVTITCRASQRIGRRLHWYQQKPDQSPKLLIKHASQSISGVPSRFSGSGSGTDFTLTINSLEAEDAATYYCHQSIGSPPLTFGQGTKVEIK

SEQ ID NO: 399 - protein, 108 aa, Artificial Sequence
  source: /note="Description of Artificial Sequence: Synthetic polypeptide"
EIVLTQSPDFQSVTPKEKVTITCRASQSIGRGLHWYQQKPDQSPKLLIKYGSQSMSGVPSRFSGSGSGTDFTLTINSLEAEDAATYYCHQSSSLPPPTFGQGTKVEIK

SEQ ID NO: 400 - protein, 108 aa, Artificial Sequence
  source: /note="Description of Artificial Sequence: Synthetic polypeptide"
EIVLTQSPDFQSVTPKEKVTITCRASQSIGCSLHWYQQKPDQSPKLLIKYASQSISGVPSRFSGSGSGTDFTLTINSLEAEDAATYYCHQCTSLPLPTFGQGTKVEIK

SEQ ID NO: 401 - protein, 108 aa, Artificial Sequence
  source: /note="Description of Artificial Sequence: Synthetic polypeptide"
EIVLTQSPDFQSVTPKEKVTITCRASQGIGSSLHWYQQKPDQSPKLLIKYVSQSISGVPSRFSGSGSGTDFTLTINSLEAEDAATYYCHQGSSLPTPTFGQGTKVEIK

SEQ ID NO: 402 - protein, 108 aa, Artificial Sequence
  source: /note="Description of Artificial Sequence: Synthetic polypeptide"
EIVLTQSPDFQSVTPKEKVTITCRASQSIGTSLHWYQQKPDQSPKLLIKHASQSSSGVPSRFSGSGSGTDFTLTINSLEAEDAATYYCHQSSRLPPLTFGQGTKVEIK

SEQ ID NO: 403 - protein, 108 aa, Artificial Sequence
  source: /note="Description of Artificial Sequence: Synthetic polypeptide"
EIVLTQSPDFQSVTPKEKVTITCRASQVIGGVLHWYQQKPDQSPKLLIKYTSQSISGVPSRFSGSGSGTDFTLTINSLEAEDAATYYCHQSSSSPRPTFGQGTKVEIK

SEQ ID NO: 404 - protein, 108 aa, Artificial Sequence
  source: /note="Description of Artificial Sequence: Synthetic polypeptide"
EIVLTQSPDFQSVTPKEKVTITCRASQSIGSSLHWYQQKPDQSPKLLIKHSSQSLSGVPSRFSGSGSGTDFTLTINSLEAEDAATYYCHQRSNSPHRTFGQGTKVEIK

SEQ ID NO: 405 - protein, 108 aa, Artificial Sequence
  source: /note="Description of Artificial Sequence: Synthetic polypeptide"
EIVLTQSPDFQSVTPKEKVTITCRASQSIGRTLHWYQQKPDQSPKLLIKYASQSISGVPSRFSGSGSGTDFTLTINSLEAEDAATYYCHQCSISPQPTFGQGTKVEIK

SEQ ID NO: 406 - protein, 108 aa, Artificial Sequence
  source: /note="Description of Artificial Sequence: Synthetic polypeptide"
EIVLTQSPDFQSVTPKEKVTITCRASQRIGNTLHWYQQKPDQSPKLLIKYPSQSISGVPSRFSGSGSGTDFTLTINSLEAEDAATYYCHQSGSSPPPTFGQGTKVEIK

SEQ ID NO: 407 - protein, 108 aa, Artificial Sequence
  source: /note="Description of Artificial Sequence: Synthetic polypeptide"
EIVLTQSPDFQSVTPKEKVTITCRASQSIGSRLHWYQQKPDQSPKLLIKYISQSMSGVPSRFSGSGSGTDFTLTINSLEAEDAATYYCHQSCGLPPPTFGQGTKVEIK

SEQ ID NO: 408 - protein, 108 aa, Artificial Sequence
  source: /note="Description of Artificial Sequence: Synthetic polypeptide"
EIVLTQSPDFQSVTPKEKVTITCRASQNIGTRLHWYQQKPDQSPKLLIKYGSQSLSGVPSRFSGSGSGTDFTLTINSLEAEDAATYYCHQSRISPPPTFGQGTKVEIK

SEQ ID NO: 409 - protein, 108 aa, Artificial Sequence
  source: /note="Description of Artificial Sequence: Synthetic polypeptide"
EIVLTQSPDFQSVTPKEKVTITCRASQSIGSTLHWYQQKPDQSPKLLIKYVSQSISGVPSRFSGSGSGTDFTLTINSLEAEDAATYYCHQCSRLPPPTFGQGTKVEIK

SEQ ID NO: 410 - protein, 108 aa, Artificial Sequence
  source: /note="Description of Artificial Sequence: Synthetic polypeptide"
EIVLTQSPDFQSVTPKEKVTITCRASQSIGSRLHWYQQKPDQSPKLLIKYASQSTSGVPSRFSGSGSGTDFTLTINSLEAEDAATYYCHQSSNLPSPTFGQGTKVEIK

SEQ ID NO: 411 - protein, 108 aa, Artificial Sequence
  source: /note="Description of Artificial Sequence: Synthetic polypeptide"
EIVLTQSPDFQSVTPKEKVTITCRASQSIGSNLHWYQQKPDQSPKLLIKHASQSMSGVPSRFSGSGSGTDFTLTINSLEAEDAATYYCHQSSSLPRPTFGQGTKVEIK

SEQ ID NO: 412 - protein, 108 aa, Artificial Sequence
  source: /note="Description of Artificial Sequence: Synthetic polypeptide"
EIVLTQSPDFQSVTPKEKVTITCRASQIIGSSLHWYQQKPDQSPKLLIKYASQSISGVPSRFSGSGSGTDFTLTINSLEAEDAATYYCHQSISSPSPTFGQGTKVEIK

SEQ ID NO: 413 - protein, 108 aa, Artificial Sequence
  source: /note="Description of Artificial Sequence: Synthetic polypeptide"
EIVLTQSPDFQSVTPKEKVTITCRASQSIGSSLHWYQQKPDQSPKLLIKYASQSFSGVPSRFSGSGSGTDFTLTINSLEAEDAATYYCHQSNCLPPPTFGQGTKVEIK

SEQ ID NO: 414 - protein, 108 aa, Artificial Sequence
  source: /note="Description of Artificial Sequence: Synthetic polypeptide"
EIVLTQSPDFQSVTPKEKVTITCRASQSIGKSLHWYQQKPDQSPKLLIKHESQSISGVPSRFSGSGSGTDFTLTINSLEAEDAATYYCHQANSLPPPTFGQGTKVEIK

SEQ ID NO: 415 - protein, 108 aa, Artificial Sequence
  source: /note="Description of Artificial Sequence: Synthetic polypeptide"
EIVLTQSPDFQSVTPKEKVTITCRASQSIGRRLHWYQQKPDQSPKLLIKYASQSISGVPSRFSGSGSGTDFTLTINSLEAEDAATYYCHQCSSSPPSTFGQGTKVEIK

SEQ ID NO: 416 - protein, 108 aa, Artificial Sequence
  source: /note="Description of Artificial Sequence: Synthetic polypeptide"
EIVLTQSPDFQSVTPKEKVTITCRASQIIGHSLHWYQQKPDQSPKLLIKHASQSILGVPSRFSGSGSGTDFTLTINSLEAEDAATYYCHQSIKSPPATFGQGTKVEIK

SEQ ID NO: 417 - protein, 108 aa, Artificial Sequence
  source: /note="Description of Artificial Sequence: Synthetic polypeptide"
EIVLTQSPDFQSVTPKEKVTITCRASQSIGTSLHWYQQKPDQSPKLLIKHTSQSKSGVPSRFSGSGSGTDFALTINSLEAEDAATYYCHQSSNSPRYTFGQGTKVEIK

SEQ ID NO: 418 - protein, 108 aa, Artificial Sequence
  source: /note="Description of Artificial Sequence: Synthetic polypeptide"
EIVLTQSPDFQSVTPKEKVTITCRASQSIGSSLHWYQQKPDQSPKLLIKHASQSHSGVPSRFSGSGSGTDFTLTINSLEAEDAATYYCHQSGGSPPWTFGQGTKVEIK

SEQ ID NO: 419 - protein, 108 aa, Artificial Sequence
  source: /note="Description of Artificial Sequence: Synthetic polypeptide"
EIVLTQSPDFQSVTPKEKVTITCRASQGIGRSLHWYQQKPDQSPKLLIKYASQSLSGVPSRFSGSGSGTDFTLTINSLEAEDAATYYCHQSNRSPPPTFGQGTKVEIK

SEQ ID NO: 420 - protein, 108 aa, Artificial Sequence
  source: /note="Description of Artificial Sequence: Synthetic polypeptide"
EIVLTQSPDFQSVTPKEKVTITCRASQSIGTTLHWYQQKPDQSPKLLIKHVSQSTSGVPSRFSGSGSGTDFTLTINSLEAEDAATYYCHQSSSLPHPTFGQGTKVEIK

SEQ ID NO: 421 - protein, 108 aa, Artificial Sequence
  source: /note="Description of Artificial Sequence: Synthetic polypeptide"
EIVLTQSPDFQSVTPKEKVTITCRASQIIGSSLHWYQQKPDQSPKLLIKYPSQSTSGVPSRFSGSGSGTDFTLTINSLEAEDAATYYCHQSWSSPLMTFGQGTKVEIK

SEQ ID NO: 422 - protein, 108 aa, Artificial Sequence
  source: /note="Description of Artificial Sequence: Synthetic polypeptide"
EIVLTQSPDFQSVTPKEKVTITCRASQSIGNTLHWYQQKPDQSPKLLIKHASQSISGVPSRFSGSGSGTDFTLTINSLEAEDAATYYCHQSSSSPPPTFGQGTKVEIK

SEQ ID NO: 423 - protein, 108 aa, Artificial Sequence
  source: /note="Description of Artificial Sequence: Synthetic polypeptide"
EIVLTQSPDFQSVTPKEKVTITCRASQRIGICLHWYQQKPDQSPKLLIKYASQSMSGVPSRFSGSGSGTDFTLTINSLEAEDAATYYCHQGFSLPPATFGQGTKVEIK

SEQ ID NO: 424 - protein, 108 aa, Artificial Sequence
  source: /note="Description of Artificial Sequence: Synthetic polypeptide"
EIVLTQSPDFQSVTPKEKVTITCRASQSIGSCLHWYQQKPDQSPKLLIKYPSQSTSGVPSRFSGSGSGTDFTLTINSLEAEDAATYYCHQGSCSPTTTFGQGTKVEIK

SEQ ID NO: 425 - protein, 108 aa, Artificial Sequence; identical to SEQ ID NO: 406
  source: /note="Description of Artificial Sequence: Synthetic polypeptide"

SEQ ID NO: 426 - protein, 108 aa, Artificial Sequence
  source: /note="Description of Artificial Sequence: Synthetic polypeptide"
EIVLTQSPDFQSVTPKEKVTITCRASQTIGTSLHWYQQKPDQSPKLLIKYASQSTSGVPSRFSGSGSGTDFTLTINSLEAEDAATYYCHQRCSLPPPTFGQGTKVEIK

SEQ ID NO: 427 - protein, 108 aa, Artificial Sequence
  source: /note="Description of Artificial Sequence: Synthetic polypeptide"
EIVLTQSPDFQSVTPKEKVTITCRASQSIGGSLHWYQQKPDQSPKLLIKYASQSHSGVPSRFSGSGSGTDFTLTINSLEAEDAATYYCHQCRISPRPTFGQGTKVEIK

SEQ ID NO: 428 - protein, 108 aa, Artificial Sequence
  source: /note="Description of Artificial Sequence: Synthetic polypeptide"
EIVLTQSPDFQSVTPKEKVTITCRASQRIGSSLHWYQQKPDQSPKLLIKHPSQSKSGVPSRFSGSGSGTDFTLSINSLEAEDAATYYCHQTSRSPLHTFGQGTKVEIK

SEQ ID NO: 429 - protein, 108 aa, Artificial Sequence
  source: /note="Description of Artificial Sequence: Synthetic polypeptide"
EIVLTQSPDFQSVTPKEKVTITCRASQNIGKNLHWYQQKPDQSPKLLIKYPSQSISGVPSRFSGSGSGTDFTLTINSLEAEDAATYYCHQSRSSPLSTFGQGTKVEIK

SEQ ID NO: 430 - protein, 108 aa, Artificial Sequence
  source: /note="Description of Artificial Sequence: Synthetic polypeptide"
EIVLTQSPDFQSVTPKEKVTITCRASQSIGSRLHWYQQKPDQSPKLLIKYMSQSISGVPSRFSGSGSGTDFTLTINSLEAEDAATYYCHQSRVLPPPTFGQGTKVEIK

SEQ ID NO: 431 - protein, 108 aa, Artificial Sequence
  source: /note="Description of Artificial Sequence: Synthetic polypeptide"
EIVLTQSPDFQSVTPKEKVTITCRASQSIGSSLHWYQQKPDQSPKLLIKYGSQSISGVPSRFSGSGSGTDFTLTINSLEAEDAATYYCHQSSISPRRTFGQGTKVEIK

SEQ ID NO: 432 - protein, 108 aa, Artificial Sequence
  source: /note="Description of Artificial Sequence: Synthetic polypeptide"
EIVLTQSPDFQSVTPKEKVTITCRASQTIGRSLHWYQQKPDQSPKLLIKYASQSISGVPSRFSGSGSGTDFTLTINSLEAEDAATYYCHQRKSSPTPTFGQGTKVEIK

SEQ ID NO: 433 - protein, 108 aa, Artificial Sequence
  source: /note="Description of Artificial Sequence: Synthetic polypeptide"
EIVLTQSPDFQSVTPKEKVTITCRASQRIGRQLHWYQQKPDQSPKLLIKHPSQSISGVPSRFSGSGSGTDFTLTINSLEAEDAATYYCHQSSSLPPQTFGQGTKVEIK

SEQ ID NO: 434 - protein, 108 aa, Artificial Sequence
  source: /note="Description of Artificial Sequence: Synthetic polypeptide"
EIVLTQSPDFQSVTPKEKVTITCRASQSIGSSLHWYQQKPDQSPKLLIKHTSQSISGVPSRFSGSGSGTDFTLTINSLEAEDAATYYCHQICRSPSPTFGQGTKVEIK

SEQ ID NO: 435 - protein, 108 aa, Artificial Sequence
  source: /note="Description of Artificial Sequence: Synthetic polypeptide"
EIVLTQSPDFQSVTPKEKVTITCRASQSIGSSLHWYQQKPDQSPKLLIKYASQSSSGVPSRFSGSGSGTDFTLTINSLEAEDAATYYCHQSSGSPAPTFGQGTKVEIK

SEQ ID NO: 436 - protein, 108 aa, Artificial Sequence
  source: /note="Description of Artificial Sequence: Synthetic polypeptide"
EIVLTQSPDFQSVTPKEKVTITCRASQSIGSSLHWYQQKPDQSPKLLIKYSSQSTSGVPSRFSGSGSGTDFTLTINSLEAEDAATYYCHQISSSPPPTFGQGTKVEIK

SEQ ID NO: 437 - protein, 108 aa, Artificial Sequence
  source: /note="Description of Artificial Sequence: Synthetic polypeptide"
EIVLTQSPDFQSVTPKEKVTITCRASQTIGNSLHWYQQKPDQSPKLLIKHASQSNSGVPSRFSGSGSGTDFTLTINSLEAEDAATYYCHQTMTSPPPTFGQGTKVEIK

SEQ ID NO: 438 - protein, 108 aa, Artificial Sequence
  source: /note="Description of Artificial Sequence: Synthetic polypeptide"
EIVLTQSPDFQSVTPKEKVTITCRASQSIGSSLHWYQQKPDQSPKLLIKHASQSISGVPSRFSGSGSGTDFTLTINSLEAEDAATYYCHQSRSSPSPTFGQGTKVEIK

SEQ ID NO: 439 - protein, 108 aa, Artificial Sequence
  source: /note="Description of Artificial Sequence: Synthetic polypeptide"
EIVLTQSPDFQSVTPKEKVTITCRASQSIGSSLHWYQQKPDQSPKLLIKHASQSISGVPSRFSGSGSGTDFTLTINSLEAEDAATYYCHQRRWSPPPTFGQGTKVEIK

SEQ ID NO: 440 - protein, 108 aa, Artificial Sequence
  source: /note="Description of Artificial Sequence: Synthetic polypeptide"
EIVLTQSPDFQSVTPKEKVTITCRASQSIGSSLHWYQQKPDQSPKLLIKYASQSNSGVPSRFSGSGSGTDFTLTINSLEAEDAATYYCHQISCLPLPTFGQGTKVEIK

SEQ ID NO: 441 - protein, 108 aa, Artificial Sequence
  source: /note="Description of Artificial Sequence: Synthetic polypeptide"
EIVLTQSPDFQSVTPKEKVTITCRASQRIGSSLHWYQQKPDQSPKLLIKHASQSISGVPSRFSGSGSGTDFTLTINSLEAEDAATYYCHQSISLPPPTFGQGTKVEIK

SEQ ID NO: 442 - protein, 108 aa, Artificial Sequence
  source: /note="Description of Artificial Sequence: Synthetic polypeptide"
EIVLTQSPDFQSVTPKEKVTITCRASQSIGRNLHWYQQKPDQSPKLLIKHTSQSLSGVPSRFSGSGSGTDFTLTINSLEAEDAATYYCHQTSTLPPQTFGQGTKVEIK

SEQ ID NO: 443 - protein, 108 aa, Artificial Sequence
  source: /note="Description of Artificial Sequence: Synthetic polypeptide"
EIVLTQSPDFQSVTPKEKVTITCRASQSIGRSLHWYQQKPDQSPKLLIKYASQSISGVPSRFSGSGSGTDFTLTINSLEAEDAATYYCHQSRNSPQPTFGQGTKVEIK

SEQ ID NO: 444 - protein, 108 aa, Artificial Sequence
  source: /note="Description of Artificial Sequence: Synthetic polypeptide"
EIVLTQSPDFQSVTPKEKVTITCRASQSIGTRLHWYQQKPDQSPKLLIKYVSQSISGVPSRFSGSGSGTDFTLTINSLEAEDAATYYCHQSSHSPPPTFGQGTKVEIK

SEQ ID NO: 445 - protein, 108 aa, Artificial Sequence
  source: /note="Description of Artificial Sequence: Synthetic polypeptide"
EIVLTQSPDFQSVTPKEKVTITCRASQSIGSCLHWYQQKPDQSPKLLIKHRSQSISGVPSRFSGSGSGTDFTLTINSLEAEDAATYYCHQWSSSPPPTFGQGTKVEIK

SEQ ID NO: 446 - protein, 108 aa, Artificial Sequence
  source: /note="Description of Artificial Sequence: Synthetic polypeptide"
EIVLTQSPDFQSVTPKEKVTITCRASQRIGSSLHWYQQKPDQSPKLLIKHPSQSISGVPSRFSGSGSGTDFTLTINSLEAEDAATYYCHQTSGSPSHTFGQGTKVEIK

SEQ ID NO: 447 - protein, 108 aa, Artificial Sequence
  source: /note="Description of Artificial Sequence: Synthetic polypeptide"
EIVLTQSPDFQSVTPKEKVTITCRASQGIGSSLHWYQQKPDQSPKLLIKYESQSISGVPSRFSGSGSGTDFTLTINSLEAEDAATYYCHQSSSSPPPTFGQGTKVEIK

SEQ ID NO: 448 - protein, 108 aa, Artificial Sequence
  source: /note="Description of Artificial Sequence: Synthetic polypeptide"
EIVLTQSPDFQSVTPKEKVTITCRASQSIGSSLHWYQQKPDQSPKLLIKHDSQSISGVPSRFSGSGSGTDFTLTINSLEAEDAATYYCHQGSSSPPTTFGQGTKVEIK

SEQ ID NO: 449 - protein, 108 aa, Artificial Sequence
  source: /note="Description of Artificial Sequence: Synthetic polypeptide"
EIVLTQSPDFQSVTPKEKVTITCRASQTIGSNLHWYQQKPDQSPKLLIKHASQSISGVPSRFSGSGSGTDFTLTINSLEAEDAATYYCHQRISSPPSTFGQGTKVEIK

SEQ ID NO: 450 - protein, 108 aa, Artificial Sequence
  source: /note="Description of Artificial Sequence: Synthetic polypeptide"
EIVLTQSPDFQSVTPKEKVTITCRASQTIGSSLHWYQQKPDQSPKLLIKHASQSVSGVPSRFSGSGSGTDFTLTINSLEAEDAATYYCHQSCSSPPSTFGQGTKVEIK

SEQ ID NO: 451 - protein, 108 aa, Artificial Sequence
  source: /note="Description of Artificial Sequence: Synthetic polypeptide"
EIVLTQSPDFQSVTPKEKVTITCRASQTIGSSLHWYQQKPDQSPKLLIKYVSQSLSGVPSRFSGSGSGTDFTLTINSLEAEDAATYYCHQTISSPLPTFGQGTKVEIK

SEQ ID NO: 452 - protein, 108 aa, Artificial Sequence
  source: /note="Description of Artificial Sequence: Synthetic polypeptide"
EIVLTQSPDFQSVTPKEKVTITCRASQSIGSRLHWYQQKPDQSPKLLIKHASQSISGVPSRFSGSGSGTDFTLTINSLEAEDAATYYCHQSSCSPAHTFGQGTKVEIK

SEQ ID NO: 453 - protein, 108 aa, Artificial Sequence
  source: /note="Description of Artificial Sequence: Synthetic polypeptide"
EIVLTQSPDFQSVTPKEKVTITCRDSRCIGSNLHWYQQKPDQSPKLLIKHASQSSSGVPSRFSGSGSGTDFTLTINSLEAEDAATYYCHQCSSSPPPTFGQGTKVEIK

SEQ ID NO: 454 - protein, 108 aa, Artificial Sequence
  source: /note="Description of Artificial Sequence: Synthetic polypeptide"
EIVLTQSPDFQSVTPKEKVTITCRASQSIGSTLHWYQQKPDQSPKLLIKHASQSNSGVPSRFSGSGSGTDFTLTINSLEAEDAATYYCHQSSSLPPPTFGQGTKVEIK

SEQ ID NO: 455 - protein, 108 aa, Artificial Sequence
  source: /note="Description of Artificial Sequence: Synthetic polypeptide"
EIVLTQSPDFQSVTPKEKVTITCRASQSIGDSLHWYQQKPDQSPKLLIKHASQSKSGVPSRFSGSGSGTDFTLTINSLEAEDAATYYCHQGSTSPPRTFGQGTKVEIK

SEQ ID NO: 456 - protein, 108 aa, Artificial Sequence
  source: /note="Description of Artificial Sequence: Synthetic polypeptide"
EIVLTQSPDFQSVTPKEKVTITCRASQSIGSSLHWYQQKPDQSPKLLIKHGSQSSSGVPSRFSGSGSGTDFTLTINSLEAEDAATYYCHQSWSSPIPTFGQGTKVEIK

SEQ ID NO: 457 - protein, 108 aa, Artificial Sequence; identical to SEQ ID NO: 410
  source: /note="Description of Artificial Sequence: Synthetic polypeptide"

SEQ ID NO: 458 - protein, 108 aa, Artificial Sequence
  source: /note="Description of Artificial Sequence: Synthetic polypeptide"
EIVLTQSPDFQSVTPKEKVTITCRASQSIGSRLHWYQQKPDQSPKLLIKHASQSTSGVPSRFSGSGSGTDFTLTINSLEAEDAATYYCHQSGSSPPRTFGQGTKVEIK

SEQ ID NO: 459 - protein, 108 aa, Artificial Sequence
  source: /note="Description of Artificial Sequence: Synthetic polypeptide"
EIVLTQSPDFQSVTPKEKVTITCRASQSIGSSLHWYQQKPDQSPKLLIKHASQSISGVPSRFSGSGSGTDFTLTINSLEAEDAATYYCHQRTSSPVRTFGQGTKVEIK

SEQ ID NO: 460 - protein, 108 aa, Artificial Sequence
  source: /note="Description of Artificial Sequence: Synthetic polypeptide"
EIVLTQSPDFQSVTPKEKVTITCRASQSIGNTLHWYQQKPDQSPKLLIKHVSQSVSGVPSRFSGSGSGTDFTLTINSLEAEDAATYYCHQKVSSPSPTFGQGTKVEIK

SEQ ID NO: 461 - protein, 108 aa, Artificial Sequence
  source: /note="Description of Artificial Sequence: Synthetic polypeptide"
EIVLTQSPDFQSVTPKEKVTITCRASQRIGSSLHWYQQKPDQSPKLLIKHASQSVSGVPSRFSGSGSGTDFTLTINSLEAEDAATYYCHQSRSSPPPTFGQGTKVEIK

SEQ ID NO: 462 - protein, 108 aa, Artificial Sequence
  source: /note="Description of Artificial Sequence: Synthetic polypeptide"
EIVLTQSPDFQSVTPKEKVTITCRASQSIGSSLHWYQQKPDQSPKLLIKHASQSTSGVPSRFSGSGSGTDFTLTINSLEAEDAATYYCHQSSSSPPSTFGQGTKVEIK

SEQ ID NO: 463 - protein, 108 aa, Artificial Sequence
  source: /note="Description of Artificial Sequence: Synthetic polypeptide"
EIVLTQSPDFQSVTPKEKVTITCRASQSIGSSLHWYQQKPDQSPKLLIKYASQSISGVPSRFSGSGSGTDFTLTINSLEAEDAATYYCHQNSSSPSTTFGQGTKVEIK

SEQ ID NO: 464 - protein, 108 aa, Artificial Sequence
  source: /note="Description of Artificial Sequence: Synthetic polypeptide"
EIVLTQSPDFQSVTPKEKVTITCRASQCIGSSLHWYQQKPDQSPKLLIKHESQSSSGVPSRFSGSGSGTDFTLTINSLEAEDAATYYCHQRCTSPSPTFGQGTKVEIK

SEQ ID NO: 465 - protein, 108 aa, Artificial Sequence
  source: /note="Description of Artificial Sequence: Synthetic polypeptide"
EIVLTQSPDFQSVTPKEKVTITCRASQRIGSSLHWYQQKPDQSPKLLIKHPSQSDSGVPSRFSGSGSGTDFTLTINSLEAEDAATYYCHQNCSLPLPTFGQGTKVEIK

SEQ ID NO: 466 - protein, 108 aa, Artificial Sequence
  source: /note="Description of Artificial Sequence: Synthetic polypeptide"
EIVLTQSPDFQSVTPKEKVTITCRASQCIGSSLHWYQQKPDQSPKLLIKHASQSTSGVPSRFSGSGSGTDFTLTINSLEAEDAATYYCHQGISSPPQTFGQGTKVEIK

SEQ ID NO: 467 - protein, 108 aa, Artificial Sequence
  source: /note="Description of Artificial Sequence: Synthetic polypeptide"
EIVLTQSPDFQSVTPKEKVTITCRASQSIGSSLHWYQQKPDQSPKLLIKHVSQSLSGVPSRFSGSGSGTDFTLTINSLEAEDAATYYCHQRSSSPSPTFGQGTKVEIK

SEQ ID NO: 468 - protein, 108 aa, Artificial Sequence
  source: /note="Description of Artificial Sequence: Synthetic polypeptide"
EIVLTQSPDFQSVTPKEKVTITCRASQSIGSSLHWYQQKPDQSPKLLIKHPSQSLSGVPSRFSGSGSGTDFTLTINSLEAEDAATYYCHQSIRLPPSTFGQGTKVEIK

SEQ ID NO: 469 - protein, 108 aa, Artificial Sequence
  source: /note="Description of Artificial Sequence: Synthetic polypeptide"
EIVLTQSPDFQSVTPKEKVTITCRANQSIGGSLHWYQQKPDQSPKLLIKHASQSKSGVPSRFSGSGSGTDFTLTINSLEAEDAATYYCHQDSRSPTRTFGQGTKVEIK

SEQ ID NO: 470 - protein, 108 aa, Artificial Sequence
  source: /note="Description of Artificial Sequence: Synthetic polypeptide"
EIVLTQSPDFQSVTPKEKVTITCRASQSIGSGLHWYQQKPDQSPKLLIKHTSQSISGVPSRFSGSGSGTDFTLTINSLEAEDAATYYCHQSSSLPHPTFGQGTKVEIK

SEQ ID NO: 471 - protein, 108 aa, Artificial Sequence
  source: /note="Description of Artificial Sequence: Synthetic polypeptide"
EIVLTQSPDFQSVTPKEKVTITCRASQSIGSSLHWYQQKPDQSPKLLIKHASQSTSGVPSRFSGSGSGTDFTLTINSLEAEDAATYYCHQSSSSPTPTFGQGTKVEIK

SEQ ID NO: 472 - protein, 108 aa, Artificial Sequence
  source: /note="Description of Artificial Sequence: Synthetic polypeptide"
EIVLTQSPDFQSVTPKEKVTITCRASQSIGSRLHWYQQKPDQSPKLLIKYPSQSRSGVPSRFSGSGSGTDLTLTINSLEAEDAATYYCHQNGSLPPPTFGQGTKVEIK

SEQ ID NO: 473 - protein, 108 aa, Artificial Sequence
  source: /note="Description of Artificial Sequence: Synthetic polypeptide"
EIVLTQSPDFQSVTPKEKVTITCRASQSIGSSLHWYQQKPDQSPKLLIKHASQSISGVPSRFSGSGSGTDFTLTINSLEAEDAATYYCHQNSSSPPPTFGQGTKVEIK

SEQ ID NO: 474 - protein, 108 aa, Artificial Sequence
  source: /note="Description of Artificial Sequence: Synthetic polypeptide"
EIVLTQSPDFQSVTPKEKVTITCRASQSIGSALHWYQQKPDQSPKLLIKHASQSLSGVPSRFSGSGSGTDFTLTINSLEAEDAATYYCHQSSILPRPTFGQGTKVEIK

SEQ ID NO: 475 - protein, 108 aa, Artificial Sequence
  source: /note="Description of Artificial Sequence: Synthetic polypeptide"
EIVLTQSPDFQSVTPKEKVTITCRASQSIGSNLHWYQQKPDQSPKLLIKHASQSISGVPSRFSGSGSGTDFTLTINSLEAEDAATYYCHQTRTSPPLTFGQGTKVEIK

SEQ ID NO: 476 - protein, 108 aa, Artificial Sequence
  source: /note="Description of Artificial Sequence: Synthetic polypeptide"
EIVLTQSPDFQSVTPKEKVTITCRASQKIGSSLHWYQQKPDQSPKLLIKYGSQSTSGVPSRFSGSGSGTDFTLTINSLEAEDAATYYCHQCISLPTPTFGQGTKVEIK

SEQ ID NO: 477 - protein, 108 aa, Artificial Sequence
  source: /note="Description of Artificial Sequence: Synthetic polypeptide"
EIVLTQSPDFQSVTPKEKVAITCRASQRIGSSLHWYQQKPDQSPKLLIKYASQSISGVPSRFSGSGSGTDFTLTINSLEAEDAATYYCHQNSSLPPPTFGQGTKVEIK

SEQ ID NO: 478 - protein, 120 aa, Artificial Sequence; identical to SEQ ID NO: 236
  source: /note="Description of Artificial Sequence: Synthetic polypeptide"

SEQ ID NO: 479 - protein, 120 aa, Artificial Sequence; identical to SEQ ID NO: 223
  source: /note="Description of Artificial Sequence: Synthetic polypeptide"

SEQ ID NO: 480 - protein, 120 aa, Artificial Sequence; identical to SEQ ID NO: 256
  source: /note="Description of Artificial Sequence: Synthetic polypeptide"

SEQ ID NO: 481 - protein, 120 aa, Artificial Sequence; identical to SEQ ID NO: 250
  source: /note="Description of Artificial Sequence: Synthetic polypeptide"

SEQ ID NO: 482 - protein, 120 aa, Artificial Sequence; identical to SEQ ID NO: 266
  source: /note="Description of Artificial Sequence: Synthetic polypeptide"

SEQ ID NO: 483 - protein, 120 aa, Artificial Sequence; identical to SEQ ID NO: 225
  source: /note="Description of Artificial Sequence: Synthetic polypeptide"

SEQ ID NO: 484 - protein, 120 aa, Artificial Sequence; identical to SEQ ID NO: 239
  source: /note="Description of Artificial Sequence: Synthetic polypeptide"

SEQ ID NO: 485 - protein, 120 aa, Artificial Sequence; identical to SEQ ID NO: 244
  source: /note="Description of Artificial Sequence: Synthetic polypeptide"

SEQ ID NO: 486 - protein, 120 aa, Artificial Sequence; identical to SEQ ID NO: 237
  source: /note="Description of Artificial Sequence: Synthetic polypeptide"

SEQ ID NO: 487 - protein, 108 aa, Artificial Sequence; identical to SEQ ID NO: 460
  source: /note="Description of Artificial Sequence: Synthetic polypeptide"

SEQ ID NO: 488 - protein, 107 aa, Artificial Sequence
  source: /note="Description of Artificial Sequence: Synthetic polypeptide"
EIVLTQSPDFQSVTPKEKVTITCRASQSIGSTLHWYQQKPDQSPKLLIKHASQSNSGVPSRFSGSGSGTDFTLTINSLEAEDAATYYCHQSSSLPPPTFGQGTKVEI

SEQ ID NO: 489 - protein, 108 aa, Artificial Sequence; identical to SEQ ID NO: 458
  source: /note="Description of Artificial Sequence: Synthetic polypeptide"

SEQ ID NO: 490 - protein, 108 aa, Artificial Sequence; identical to SEQ ID NO: 461
  source: /note="Description of Artificial Sequence: Synthetic polypeptide"

SEQ ID NO: 491 - protein, 108 aa, Artificial Sequence; identical to SEQ ID NO: 462
  source: /note="Description of Artificial Sequence: Synthetic polypeptide"

SEQ ID NO: 492 - protein, 108 aa, Artificial Sequence
  source: /note="Description of Artificial Sequence: Synthetic polypeptide"
EIVLTQSPDFQSVTPKEKVTITCRASQTIGSSLHWYQQKPDQSPKLLIKHASQSISGVPSRFSGSGSGTDFTLTINSLEAEDAATYYCHQTSSLPTPTFGQGTKVEIK

SEQ ID NO: 493 - protein, 108 aa, Artificial Sequence
  source: /note="Description of Artificial Sequence: Synthetic polypeptide"
EIVLTQSPDFQSVTPKEKVTITCRASQTIGSSLHWYQQKPDQSPKLLIKHASQSISGVPSRFSGSGSGTDFTLTINSLEAEDAATYYCHQSSSSPPPTFGQGTKVEIK

SEQ ID NO: 494 - protein, 108 aa, Artificial Sequence; identical to SEQ ID NO: 467
  source: /note="Description of Artificial Sequence: Synthetic polypeptide"

SEQ ID NO: 495 - protein, 108 aa, Artificial Sequence; identical to SEQ ID NO: 475
  source: /note="Description of Artificial Sequence: Synthetic polypeptide"

SEQ ID NO: 496 - protein, 117 aa, Artificial Sequence
  source: /note="Description of Artificial Sequence: Synthetic polypeptide"
EVQLVESGGGLVQPGGSLRLSCAASGFTFSNYGVSWVRQAPGKGLEWVSIIRGDGSTDYASTLKSRFTISRDNSKNTLYLQMNSLRAEDTAVYYCAREWQHGPVAYWGQGTLVTVSS

SEQ ID NO: 497 - protein, 117 aa, Artificial Sequence
  source: /note="Description of Artificial Sequence: Synthetic polypeptide"
EVQLVESGGGLVQPGGSLRLSCAASGFTFSNYGVSWVRQAPGKGLEWVSIIRGDGSTDYADSVKSRFTISRDNSKNTLYLQMNSLRAEDTAVYYCAREWHHGPVAYWGQGTLVTVSS

SEQ ID NO: 498 - protein, 117 aa, Artificial Sequence
  source: /note="Description of Artificial Sequence: Synthetic polypeptide"
EVQLVESGGGLVQPGGSLRLSCAASGFTFSAYGVNWVRQAPGKGLEWVSIIWGDGATDYADSVKGRFTISRDNSKNTLYLQMNSLRAEDTAVYYCAREWHHGPVAYWGQGTLVTVSS

SEQ ID NO: 499 - protein, 117 aa, Artificial Sequence
  source: /note="Description of Artificial Sequence: Synthetic polypeptide"
EVQLVESGGGLVQPGGSLRLSCAASGFTFSNYGVNWVRQAPGKGLEWVSMISSDGFTDYASSVKSRFTISRDNSKNTLYLQMNSLRAEDTAVYYCAREWQHGPVAYWGQGTLVTVSS

SEQ ID NO: 500 - protein, 117 aa, Artificial Sequence
  source: /note="Description of Artificial Sequence: Synthetic polypeptide"
EVQLVESGGGLVQPGGSLRLSCAASGFTFSNYGVTWVRQAPGKGLEWVSMIAADGSTDYASSVKGRFTISRDNSKNTLYLQMNSLRAEDTAVYYCAREWQHGPVAYWGQGTLVTVSS

SEQ ID NO: 501 - protein, 117 aa, Artificial Sequence
  source: /note="Description of Artificial Sequence: Synthetic polypeptide"
EVQLVESGGGLVQPGGSLRLSCAASGFTFSNYGVTWVRQAPGKGLEWVSMIRADGSTDYASSLKSRFTISRDNSKNTLYLQMNSLRAEDTAVYYCAREWHHGPVAYWGQGTLVTVSS

SEQ ID NO: 502 - protein, 117 aa, Artificial Sequence
  source: /note="Description of Artificial Sequence: Synthetic polypeptide"
EVQLVESGGGLVQPGGSLRLSCAASGFTFSNYGVTWVRQAPGKGLEWVSMIRDDGSTDYADTVKGRFTISRDNSKNTLYLQMNSLRAEDTAVYYCAREWHHGPVAYWGQGTLVTVSS

SEQ ID NO: 503 - protein, 117 aa, Artificial Sequence
  source: /note="Description of Artificial Sequence: Synthetic polypeptide"
EVQLVESGGGLVQPGGSLRLSCAASGFTFSHIGVSWVRQAPGKGLEWVSMISYAGSTDYASTVKGRFTISRDNSKNTLYLQMNSLRAEDTAVYYCARLLHKGPIDYWGQGTLVTVSS

SEQ ID NO: 504 - protein, 117 aa, Artificial Sequence
  source: /note="Description of Artificial Sequence: Synthetic polypeptide"
EVQLVESGGGLVQPGGSLRLSCAASGFTFSDFGVNWVRQAPGKGLEWVSMIWSDGSTDYADTVKSRFTISRDNSKNTLYLQMNSLRAEDTAVYYCAREWHHGPVAYWGQGTLVTVSS

SEQ ID NO: 505 - protein, 117 aa, Artificial Sequence
  source: /note="Description of Artificial Sequence: Synthetic polypeptide"
EVQLVESGGGLVQPGGSLRLSCAASGFTFSNYGVSWVRQAPGKGLEWVSIIRADGSTDYASSLKGRFTISRDNSKNTLYLQMNSLRAEDTAVYYCAREWHHGPVAYWGQGTLVTVSS

SEQ ID NO: 506 - protein, 117 aa, Artificial Sequence
  source: /note="Description of Artificial Sequence: Synthetic polypeptide"
EVQLVESGGGLVQPGGSLRLSCAASGFTFSNYGVQWVRQAPGKGLEWVSMIRGDGSTDYASSLKGRFTISRDNSKNTLYLQMNSLRAEDTAVYYCARPSHHGLIDNWGQGTLVTVSS

SEQ ID NO: 507 - protein, 117 aa, Artificial Sequence
  source: /note="Description of Artificial Sequence: Synthetic polypeptide"
EVQLVESGGGLVQPGGSLRLSCAASGFTFSELGVNWVRQAPGKGLEWVSYISDVGSTYYASTVKGRFTISRDNSKNTLYLQMNSLRAEDTAVYYCARDWHHGRFDYWGQGTLVTVSS

SEQ ID NO: 508 - protein, 117 aa, Artificial Sequence
  source: /note="Description of Artificial Sequence: Synthetic polypeptide"
EVQLVESGGGLVQPGGSLRLSCAASGFTFSNYGVSWVRQAPGKGLEWVSLIRADGSTDYADSLKGRFTISRDNSKNTLYLQMNSLRAEDTAVYYCAREWHHGPVAYWGQGTLVTVSS

SEQ ID NO: 509 - protein, 117 aa, Artificial Sequence
  source: /note="Description of Artificial Sequence: Synthetic polypeptide"
EVQLVESGGGLVQPGGSLRLSCAASGFTFSNYGVTWVRQAPGKGLEWVSMIRADGFTDYADSVKGRFTISRDNSKNTLYLQMNSLRAEDTAVYYCARDWQHGPSVYWGQGTLVTVSS

SEQ ID NO: 510 - protein, 117 aa, Artificial Sequence
  source: /note="Description of Artificial Sequence: Synthetic polypeptide"
EVQLVESGGGLVQPGGSLRLSCAASGFTFSNYGVTWVRQAPGKGLEWVSIIRADGVTDYASSVKGRFTISRDNSKNTLYLQMNSLRAEDTAVYYCAREWHHGPVAYWGQGTLVTVSS

SEQ ID NO: 511 - protein, 117 aa, Artificial Sequence
  source: /note="Description of Artificial Sequence: Synthetic polypeptide"
EVQLVESGGGLVQPGGSLRLSCAASGFTFSNYGVHWVRQAPGKGLEWVSMIGADGYTDYADSLKGRFTISRDNSKNTLYLQMNSLRAEDTAVYYCAREWHHGPVAYWGQGTLVTVSS

SEQ ID NO: 512 - protein, 117 aa, Artificial Sequence
  source: /note="Description of Artificial Sequence: Synthetic polypeptide"
EVQLVESGGGLVQPGGSLRLSCAASGFTFSNYGVSWVRQAPGKGLEWVSMISADGSTDYASSVKGRFTISRDNSKNTLYLQMNSLRAEDTAVYYCAREWHHGPVAYWGQGTLVTVSS

SEQ ID NO: 513 - protein, 117 aa, Artificial Sequence
  source: /note="Description of Artificial Sequence: Synthetic polypeptide"
EVQLVESGGGLVQPGGSLRLSCAASGFTFSNYGVTWVRQAPGKGLEWVSMIRSDGFTDYADSVKGRFTISRDNSKNTLYLQMNSLRTEDTAVYYCAREWHHGPVAYWGQGTLVTVSS

SEQ ID NO: 514 - protein, 117 aa, Artificial Sequence
  source: /note="Description of Artificial Sequence: Synthetic polypeptide"
EVQLVESGGGLVQPGGSLRLSCAASGFTFSEYGVNWVRQAPGKGLEWVSIIWHDGSTAYADTVKSRFTISRDNSKNTLYLQMNSLRAEDTAVYYCAREWHHGPVAYWGQGTLVTVSS

SEQ ID NO: 515 - protein, 117 aa, Artificial Sequence
  source: /note="Description of Artificial Sequence: Synthetic polypeptide"
EVQLVESGGGLVQPGGSLRLSCAASGFTFSNYGVTWVRQAPGKGLEWVSLIRGDGSTDYASSVKSRFTISRDNSKNTLYLQMNSLRAEDTAVYYCAREWHHGPVAYWGQGTLVTVSS

SEQ ID NO: 516 - protein, 117 aa, Artificial Sequence
  source: /note="Description of Artificial Sequence: Synthetic polypeptide"
EVQLVESGGGLVQPGGSLRLSCAASGFTFSNFGVSWVRQAPGKGLEWVSMIWGDGSTDYADSLKGRFTISRDNSKNTLYLQMNSLRAEDTAVYYCAREWHHGPVAYWGQGTLVTVSS

SEQ ID NO: 517 - protein, 117 aa, Artificial Sequence
  source: /note="Description of Artificial Sequence: Synthetic polypeptide"
EVQLVESGGGLVQPGGSLRLSCAASGFTFSNYGVTWVRQAPGKGLEWVSMIRDDGSTYYASTVKGRFTISRDNSKNTLYLQMNSLRAEDTAVYYCAREWQHGPLGYWGQGTLVTVSS

SEQ ID NO: 518 - protein, 117 aa, Artificial Sequence
  source: /note="Description of Artificial Sequence: Synthetic polypeptide"
EVQLVESGGGLVQPGGSLRLSCAASGFTFSDFGVNWVRQAPGKGLEWVSMIWAGGSTAYASTVKGRFTISRDNSKNTLYLQMNSLRAEDTAVYYCAREWHHGPVAYWGQGTLVTVSS

SEQ ID NO: 519 - protein, 117 aa, Artificial Sequence
  source: /note="Description of Artificial Sequence: Synthetic polypeptide"
EVQLVESGGGLVQPGGSLRLSCAASGFTFSNYGVSWVRQAPGKGLEWVSLIGADGSTDYASTVKGRFTISRDNSKNTLYLQMNSLRAEDTAVYYCAREWQYGPLAYWGQGTLVTVSS

SEQ ID NO: 520 - protein, 117 aa, Artificial Sequence
  source: /note="Description of Artificial Sequence: Synthetic polypeptide"
EVQLVESGGGLVQPGGSLRLSCAASGFTFSNYGVTWVRQAPGKGLEWVSMIEGDGGTHYASSVKGRFTISRDNSKNTLYLQMNSLRAEDTAVYYCAREWHHGPVAYWGQGTLVTVSS

SEQ ID NO: 521 - protein, 117 aa, Artificial Sequence; identical to SEQ ID NO: 42
  source: /note="Description of Artificial Sequence: Synthetic polypeptide"

SEQ ID NO: 522 - protein, 117 aa, Artificial Sequence
  source: /note="Description of Artificial Sequence: Synthetic polypeptide"
  MOD_RES (41)..(41): Any amino acid
EVQLVESGGGLVQPGGSLRLSCAASGFTFSNYGVNWVRQAXGKGLEWVSMISADGTTDYASSVKGRFTISRDNSKNTLYLQMNSLRAEDTAVYYCAREWHHGPVAYWGQGTLVTVSS

SEQ ID NO: 523 - protein, 117 aa, Artificial Sequence
  source: /note="Description of Artificial Sequence: Synthetic polypeptide"
EVQLVESGGGLVQPGGSLRLSCAASGFTFSNYGVTWVRQAPGKGLEWVSIIRGDGTTDYASTVKGRFTISRDNSKNTLYLQMNSLRAEDTAVYYCAREWQHGPLGYWGQGTLVTVSS

SEQ ID NO: 524 - protein, 117 aa, Artificial Sequence
  source: /note="Description of Artificial Sequence: Synthetic polypeptide"
EVQLVESGGGLVQPGGSLRLSCAASGFTFSHYGVGWVRQAPGKGLEWVSMIWGAGSTNYADTVKSRFTISRDNSKNTLYLQMNSLRAEDTAVYYCAREWHHGPVAYWGQGTLVTVSS

SEQ ID NO: 525 - protein, 117 aa, Artificial Sequence
  source: /note="Description of Artificial Sequence: Synthetic polypeptide"
EVQLVESGGGLVQPGGSLRLSCAASGFTFSSFGVNWVRQAPGKGLEWVSMIWADGTTDYADSLKGRFTISRDNSKNTLYLQMNSLRAEDTAVYYCAREWHHGPVAYWGQGTLVTVSS

SEQ ID NO: 526 - protein, 117 aa, Artificial Sequence
  source: /note="Description of Artificial Sequence: Synthetic polypeptide"
EVQLVESGGGLVQPGGSLRLSCAASGFTFSNYGVTWVRQAPGKGLEWVSVIGGDGYTDYADSVKGRFTISRDNSKNTLYLQMNSLRAEDTAVYYCAREWQHGPVAYWGQGTLVTVSS

SEQ ID NO: 527 - protein, 117 aa, Artificial Sequence
  source: /note="Description of Artificial Sequence: Synthetic polypeptide"
  MOD_RES (43)..(43): Any amino acid
EVQLVESGGGLVQPGGSLRLSCAASGFTFSNYGVTWVRQAPGXGLEWVSMISSDGYTDYASSVKGRFTISRDNSKNTLYLQMNSLRAEDTAVYYCAREWHHGPVAYWGQGTLVTVSS

SEQ ID NO: 528 - protein, 117 aa, Artificial Sequence
  source: /note="Description of Artificial Sequence: Synthetic polypeptide"
EVQLVESGGGLVQPGGSLRLSCAASGFTFSNYGVSWVRQAPGKGLEWVSMIWSDGSTHYADTVKSRFTISRDNSKNTLYLQMNSLRAEDTAVYYCAREWHHGPVAYWGQGTLVTVSS

SEQ ID NO: 529 - protein, 117 aa, Artificial Sequence
  source: /note="Description of Artificial Sequence: Synthetic polypeptide"
EVQLVESGGGLVQPGGSLRLSCAASGFTFSQLGVTWVRQAPGKGLEWVSTISDAGSTYYASSVKGRFTIIRINSKNTLYLQMNSLRAEDTAVYYCARDWHHGRFAYWGQGTLVTVSS

SEQ ID NO: 530 - protein, 117 aa, Artificial Sequence
  source: /note="Description of Artificial Sequence: Synthetic polypeptide"
EVQLVESGGGLVQPGGSLRLSCAASGFTFSNYGVSWVRQAPGKGLEWVSIIRGDGSTYYASSLKGRFTISRDNSKNTLYLQMNSLRAEDTAVYYCAREWHHGPVAYWGQGTLVTVSS

SEQ ID NO: 531 - protein, 117 aa, Artificial Sequence
  source: /note="Description of Artificial Sequence: Synthetic polypeptide"
EVQLVESGGGLVQPGGSLRLSCAASGFTFSNYGVQWVRQAPGKGLEWVSMIRDDGSTSYASTVKGRFTISRDNSKNTLYLQMNSLRAEDTAVYYCAREWHHGPVAYWGQGTLVTVSS

SEQ ID NO: 532 - protein, 117 aa, Artificial Sequence
  source: /note="Description of Artificial Sequence: Synthetic polypeptide"
EVQLVESGGGLVQPGGSLRLSCAASGFTFSNYGVTWVRQAPGKGLEWVSIIRGDGSTDYASSVKSRFTISRDNSKNTLYLQMNSLRAEDTAVYYCAREWQHGPVAYWGQGTLVTVSS

SEQ ID NO: 533 - protein, 117 aa, Artificial Sequence
  source: /note="Description of Artificial Sequence: Synthetic polypeptide"
EVQLVESGGGLVQPGGSLRLSCAASGFTFSAYGVNWVRQAPGKGLEWVSMISGDGSTDYADSVKSRFTISRDNSKNTLYLQMNSLRAEDTAVYYCAREWHHGPVAYWGQGTLVTVSS

SEQ ID NO: 534 - protein, 117 aa, Artificial Sequence
  source: /note="Description of Artificial Sequence: Synthetic polypeptide"
EVQLVESGGGLVQPGGSLRLSCAASGFTFSHFGVTWVRQAPGKGLEWVSNIWASGSTDYADSVKGRFTISRDNSKNTLYLQMNSLRAEDTAVYYCAREWHHGPVAYWGQGTLVTVSS

SEQ ID NO: 535 - protein, 117 aa, Artificial Sequence
  source: /note="Description of Artificial Sequence: Synthetic polypeptide"
EVQLVESGGGLVQPGGSLRLSCAASGFTFSNYGVTWVRQAPGKGLEWVSMIRADGSTDYADSVKGRFTISRDNSKNTLYLQMNSLRAEDTAVYYCAREWQHGPVGYWGQGTLVTVSS

SEQ ID NO: 536 - protein, 117 aa, Artificial Sequence
  source: /note="Description of Artificial Sequence: Synthetic polypeptide"
EVQLVESGGGLVQPGGSLRLSCAASGFTFSNFGVNWVRQAPGKGLEWVSVIWGDGSTAYASSVKSRFTISRDNSKNTLYLQMNSLRAEDTAVYYCAREWHHGPVAYWGQGTLVTVSS

SEQ ID NO: 537 - protein, 117 aa, Artificial Sequence
  source: /note="Description of Artificial Sequence: Synthetic polypeptide"
EVQLVESGGGLVQPGGSLRLSCAASGFTFSNYGVSWVRQAPGKGLEWVSIIRGDGSTDYASSVKGRFTISRDNSKNTLYLQMNSLRAEDTAVYYCAREWQHGPLAYWGQGTLVTVSS

SEQ ID NO: 538 - protein, 117 aa, Artificial Sequence; identical to SEQ ID NO: 39
  source: /note="Description of Artificial Sequence: Synthetic polypeptide"

SEQ ID NO: 539 - protein, 117 aa, Artificial Sequence; identical to SEQ ID NO: 38
  source: /note="Description of Artificial Sequence: Synthetic polypeptide"

SEQ ID NO: 540 - protein, 117 aa, Artificial Sequence; identical to SEQ ID NO: 35
  source: /note="Description of Artificial Sequence: Synthetic polypeptide"

SEQ ID NO: 541 - protein, 117 aa, Artificial Sequence
  source: /note="Description of Artificial Sequence: Synthetic polypeptide"
EVQLVESGGGLVQPGGSLRISCAASGFTFSAFGVSWVRQAPGKGLEWVSMIWGDGSTDYASSVKGRFTISRDNSKNTLYLQMNSLRAEDTAVYYCAREWHHGPVAYWGQGTLVTVSS

SEQ ID NO: 542 - protein, 117 aa, Artificial Sequence
  source: /note="Description of Artificial Sequence: Synthetic polypeptide"
EVQLVESGGGLVQPGGSLRLSCAASGFTFSDLGVNWVRQAPGKGLEWVSTISDIGSTYYASTVKGRFTISRDNSKNTLYLQMNSLRAEDTAVYYCARDWHNGRFDYWGQGTLVTVSS

SEQ ID NO: 543 - protein, 117 aa, Artificial Sequence
  source: /note="Description of Artificial Sequence: Synthetic polypeptide"
EVQLVESGGGLVQPGGSLRLSCAASGFTFSNYGVSWVRQAPGKGLEWVSIIRGDGFTDYADSVKGRFTISRDNSKNTLYLQMNSLRAEDTAVYYCAREWHHGPVAYWGQGTLVTVSS

SEQ ID NO: 544 - protein, 117 aa, Artificial Sequence
  source: /note="Description of Artificial Sequence: Synthetic polypeptide"
EVQLVESGGGLVQPGGSLRLSCAASGFTFSNYGVTWVRQAPGKGLEWVSIIRADGSTDYASSVKGRFTISRDNSKNTLYLQMNSLRAEDTAVYYCAREWHHGPVAYWGQGTLVTVSS

SEQ ID NO: 545 - protein, 117 aa, Artificial Sequence
  source: /note="Description of Artificial Sequence: Synthetic polypeptide"
EVQLVESGGGLVQPGGSLRLSCAASGFTFSHFGVNWVRQAPGKGLEWVSIIWGDGSTAYASSVKGRFTISRDNSKNTLYLQMNSLRAEDTAVYYCAREWHHGPVAYWGQGTLVTVSS

SEQ ID NO: 546 - protein, 117 aa, Artificial Sequence
  source: /note="Description of Artificial Sequence: Synthetic polypeptide"
EVQLVESGGGLVQPGGSLRLSCAASGFTFSNYGVEWVRQAPGKGLEWVSKIWADGSTDYADSLKSRFTISRDNSKNTLYLQMNSLRAEDTAVYYCAREWQHGPLAYWGQGTLVTVSS

SEQ ID NO: 547 - protein, 117 aa, Artificial Sequence
  source: /note="Description of Artificial Sequence: Synthetic polypeptide"
EVQLVESGGGLVQPGGSLRLSCAASGFTFSDYGVNWVRQAPGKGLEWVSLIWGDGTTDYASSVKGRFTISRDNSKNTLYLQMNSLRAEDTAVYYCAREWHHGPVAYWGQGTLVTVSS

SEQ ID NO: 548 - protein, 117 aa, Artificial Sequence
  source: /note="Description of Artificial Sequence: Synthetic polypeptide"
EVQLVESGGGLVQPGGSLRLSCAASGFTFSYFGVSWVRQAPGKGLEWVSMIWGDGSTDYADSVKGRFTISRDNSKNTLYLQMNSLRAEDTAVYYCAREWHHGPVAYWGQGTLVTVSS

SEQ ID NO: 549 - protein, 117 aa, Artificial Sequence
  source: /note="Description of Artificial Sequence: Synthetic polypeptide"
EVQLVESGGGLVQPGGSLRLSCAASGFTFSNYGVTWVRQAPGKGLEWVSMIRSDGSTDYADTLKGRFTISRDNSKNTLYLQMNSLRAEDTAVYYCAREWQHGPLAYWGQGTLVTVSS

SEQ ID NO: 550 - protein, 117 aa, Artificial Sequence
  source: /note="Description of Artificial Sequence: Synthetic polypeptide"
EVQLVESGGGLVQPGGSLRLSCAASGFTFSDFGVNWVRQAPGKGLEWVSIIWSDGSTDYASSLKGRFTISRDNSKNTLYLQMNSLRAEDTAVYYCAREWHHGPVAYWGQGTLVTVSS

SEQ ID NO: 551 - protein, 117 aa, Artificial Sequence; identical to SEQ ID NO: 52
  source: /note="Description of Artificial Sequence: Synthetic polypeptide"

SEQ ID NO: 552 - protein, 117 aa, Artificial Sequence
  source: /note="Description of Artificial Sequence: Synthetic polypeptide"
EVQLVESGGGLVQPGGSLRLSCAASGFTFSEFGVNWVRQAPGKGLEWVSMIWGNGATDYASSVKSRFTISRDNSKNTLYLQMNSLRAEDTAVYYCAREWHHGPVAYWGQGTLVTVSS

SEQ ID NO: 553 - protein, 117 aa, Artificial Sequence
  source: /note="Description of Artificial Sequence: Synthetic polypeptide"
EVQLVESGGGLVQPGGSLRLSCAASGFTFSDFGVNWVRQAPGKGLEWVSMIWGDGTTAYASSVKSRFTISRDNSKNTLYLQMNSLRAEDTAVYYCAREWHHGPVAYWGQGTLVTVSS

SEQ ID NO: 554 - protein, 117 aa, Artificial Sequence
  source: /note="Description of Artificial Sequence: Synthetic polypeptide"
EVQLVESGGGLVQPGGSLRLSCAASGFTFSNYGVTWVRQAPGKGLEWVSMIRADGSTDYASSVKGRFTISRDNSKNTLYLQMNSLRAEDTAVYYCAREWHHGPVAYWGQGTLVTVSS

SEQ ID NO: 555 - protein, 117 aa, Artificial Sequence
  source: /note="Description of Artificial Sequence: Synthetic polypeptide"
EVQLVESGGGLVQPGGSLRLSCAASGFTFSDFGVNWVRQAPGKGLEWVSMIWGDGSTDYADSLKGRFTISRDNSKNTLYLQMNSLRAEDTAVYYCAREWHHGPVAYWGQGTLVTVSS

SEQ ID NO: 556 - protein, 117 aa, Artificial Sequence
  source: /note="Description of Artificial Sequence: Synthetic polypeptide"
  MOD_RES (41)..(41): Any amino acid
EVQLVESGGGLVQPGGSLRLSCAASGFTFSNFGVNWVRQAXGKGLEWVSMIWGDGSTDYADSLKGRFTISRDNSKNTLYLQMNSLRAEDTAVYYCAREWHHGPVAYWGQGTLVTVSS

SEQ ID NO: 557 - protein, 117 aa, Artificial Sequence
  source: /note="Description of Artificial Sequence: Synthetic polypeptide"
EVQLVESGGGLVQPGGSLRLSCAASGFTFSNYGVSWVRQAPGKGLEWVSMIGSDGFTDYASSLKGRFTISRDNSKNTLYLQMNSLRAEDTAVYYCAREWQHGPVAYWGQGTLVTVSS

SEQ ID NO: 558 - protein, 117 aa, Artificial Sequence
  source: /note="Description of Artificial Sequence: Synthetic polypeptide"
EVQLVESGGGLVQPGGSLRLSCAASGFTFSNYGVTWVRQTPGKGLEWVSMIRGDGSTDYASSVKGRFTISRDNSKNTLYLQMNSLRAEDTAVYYCAREWHHGPVAYWGQGTLVTVSS

SEQ ID NO: 559 - protein, 117 aa, Artificial Sequence
  source: /note="Description of Artificial Sequence: Synthetic polypeptide"
EVQLVESGGGLVQPGGSLRLSCAASGFTFSDFGVSWVRQAPGKGLEWVSQIWGDGSTDYADSLKGRFTISRDNSKNTLYLQMNSLRAEDTAVYYCAREWHHGPVAYWGQGTLVTVSS

SEQ ID NO: 560 - protein, 117 aa, Artificial Sequence
  source: /note="Description of Artificial Sequence: Synthetic polypeptide"
EVQLVESGGGLVQPGGSLRLSCAASGFTFSQLGVTWVRQAPGKGLEWVSTISDAGSTYYASSVKGRFTISRDNSKNTLYLQMNSLRAEDTAVYYCARDWHHGRFAYWGQGTLVTVSS

SEQ ID NO: 561 - protein, 117 aa, Artificial Sequence
  source: /note="Description of Artificial Sequence: Synthetic polypeptide"
EVQLVESGGGLVQPGGSLRLSCAASGFTFSNYGVTWVRQAPGKGLEWVSMIRADGSTDYASSVKGRFTISRDNSKNTLYLQMNSLRAEDTAVYYCARDWQHGPLGYWGQGTLVTVSS

SEQ ID NO: 562 - protein, 117 aa, Artificial Sequence
  source: /note="Description of Artificial Sequence: Synthetic polypeptide"
EVQLVESGGGLVQPGGSLRLSCAASGFTFSAYGVHWVRQAPGKGLEWVSMIWGDGSTDYADSVKSRFTISRDNSKNTLYLQMNSLRAEDTAVYYCAREWHHGPVAYWGQGTLVTVSS

SEQ ID NO: 563 - protein, 117 aa, Artificial Sequence
  source: /note="Description of Artificial Sequence: Synthetic polypeptide"
EVQLVESGGGLVQPGGSLRLSCAASGFTFSNYGVTWVRQAPGKGLEWVSMIRGDGTTDYASSVKGRFTISRDNSKNTLYLQMNSLRAEDTAVYYCARDWQHGPIGYWGQGTLVTVSS

SEQ ID NO: 564 - protein, 117 aa, Artificial Sequence
  source: /note="Description of Artificial Sequence: Synthetic polypeptide"
EVQLVESGGGLVQPGGSLRLSCAASGFTFSNYGVTWVRQAPGKGLEWVSMIWADGYTDYADSVKGRFTISRDNSKNTLYLQMNSLRAEDTAVYYCAREWQHGPLAYWGQGTLVTVSS

SEQ ID NO: 565 - protein, 117 aa, Artificial Sequence
  source: /note="Description of Artificial Sequence: Synthetic polypeptide"
EVQLVESGGGLVQPGGSLRLSCAASGFTFSNYGVEWVRQAPGKGLEWVSKIWGDGTTDYADTLKGRFTISRDNSKNTLYLQMNSLRAEDTAVYYCAREWHHGPVAYWGQGTLVTVSS

SEQ ID NO: 566 - protein, 117 aa, Artificial Sequence
  source: /note="Description of Artificial Sequence: Synthetic polypeptide"
EVQLVESGGGLVQPGGSLRLSCAASGFTFSNYGVTWVRQAPGKGLEWVSMIGGEGRTDYADSVKGRFTISRDNSKNTLYLQMNSLRAEDTAVYYCAREWHHGPVAYWGQGTLVTVSS

SEQ ID NO: 567 - protein, 117 aa, Artificial Sequence
  source: /note="Description of Artificial Sequence: Synthetic polypeptide"
EVQLVESGGGLVQPGGSLRLSCAASGFTFSNLGVNWVRQAPGKGLEWVSMIWDVGSTDYASSVKGRFTISRDNSKNTLYLQMNSLRAEDTAVYYCARDWHHGLFDYWGQGTLVTVSS

SEQ ID NO: 568 - protein, 117 aa, Artificial Sequence
  source: /note="Description of Artificial Sequence: Synthetic polypeptide"
EVQLVESGGGLVQPGGSLRLSCAASGFTFSNYGVTWVRQAPGKGLEWVSMIMGDGYTDYADSVKGRFTISRDNSKNTLYLQMNSLRAEDTAVYYCAREWQHGPVAYWGQGTLVTVSS

SEQ ID NO: 569 - protein, 117 aa, Artificial Sequence
  source: /note="Description of Artificial Sequence: Synthetic polypeptide"
EVQLVESGGGLVQPGGSLRLSCAASGFTFSNYGVTWVRQAPGKGLEWVSMIRDDGATDYADSVKGRFTISRDNSKNTLYLQMNSLRAEDTAVYYCAREWQHGPLAYWGQGTLVTVSS

SEQ ID NO: 570 - protein, 117 aa, Artificial Sequence
  source: /note="Description of Artificial Sequence: Synthetic polypeptide"
EVQLVESGGGLVQPGGSLRLSCAASGFTFSNYGVTWVRQAPGKGLEWVSMISGDGYTDYADSVKGRFTISRDNSKNTLYLQMNSLRAEDTAVYYCAREWQHGPLAYWGQGTLVTVSS

SEQ ID NO: 571 - protein, 117 aa, Artificial Sequence
  source: /note="Description of Artificial Sequence: Synthetic polypeptide"
EVQLVESGGGLVQPGGSLRLSCAASGFTFSNYGVTWVRQAPGKGLEWVSIIRGDGSTDYADSVKGRFTISRDNSKNTLYLQMNSLRAEDTAVYYCAREWHHGPVAYWGQGTLVTVSS

SEQ ID NO: 572 - protein, 117 aa, Artificial Sequence
  source: /note="Description of Artificial Sequence: Synthetic polypeptide"
  MOD_RES (43)..(43): Any amino acid
EVQLVESGGGLVQPGGSLRLSCAASGFTFSNFGVNWVRQAPGXGLEWVSMIWADGSTDYASTLKGRFTISRDNSKNTLYLQMNSLRAEDTAVYYCAREWHHGPVAYWGQGTLVTVSS

SEQ ID NO: 573 - protein, 117 aa, Artificial Sequence
  source: /note="Description of Artificial Sequence: Synthetic polypeptide"
EVQLVESGGGLVQPGGSLRLSCAASGFTFSAFGVCWVRQAPGKGLEWVSMIWADGSTDYASSVKGRFTISRDNSKNTLYLQMNSLRAEDTAVYYCAREWHHGPVAYWGQGTLVTVSS

SEQ ID NO: 574 - protein, 117 aa, Artificial Sequence
  source: /note="Description of Artificial Sequence: Synthetic polypeptide"
EVQLVESGGGLVQPGGSLRLSCAASGFTFSNYGVTWVRQAPGKGLEWVSMIRSDGSTDYASSVKSRFTISRDNSKNTLYLQMNSLRAEDTAVYYCARDWQHGPEGYWGQGTLVTVSS

SEQ ID NO: 575 - protein, 117 aa, Artificial Sequence
  source: /note="Description of Artificial Sequence: Synthetic polypeptide"
EVQLVESGGGLVQPGGSLRLSCAASGFTFSNYGVNWVRQAPGKGLEWVSMIRGDGSTDYASSVKGRFTISRDNSKNTLYLQMNSLRAEDTAVYYCAREWHHGPVAYWGQGTLVTVSS

SEQ ID NO: 576 - protein, 117 aa, Artificial Sequence
  source: /note="Description of Artificial Sequence: Synthetic polypeptide"
EVQLVESGGGLVQPGGSLRLSCAASGFTFSNYGVSWVRQAPGKGLEWVSLIRSDGSTHYADSLKGRFTISRDNSKNTLYLQMNSLRAEDTAVYYCAREWHHGPVAYWGQGTLVTVSS

SEQ ID NO: 577 - protein, 117 aa, Artificial Sequence
  source: /note="Description of Artificial Sequence: Synthetic polypeptide"
EVQLVESGGGLVQPGGSLRLSCAASGFTFSNYGVNWVRQAPGKGLEWVSMIRGDGYTDYASSVKGRFTISRDNSKNTLYLQMNSLRAEDTAVYYCAREWHHGPVAYWGQGTLVTVSS

SEQ ID NO: 578 - protein, 117 aa, Artificial Sequence
  source: /note="Description of Artificial Sequence: Synthetic polypeptide"
EVQLVESGGGLVQPGGSLRLSCAASGFTFSNYGVTWVRQAPGKGLEWVSMIWADGSTHYADSLKGRFTISRDNSKNTLYLQMNSLRAEDTAVYYCAREWQHGPVAYWGQGTLVTVSS

SEQ ID NO: 579 - protein, 117 aa, Artificial Sequence; identical to SEQ ID NO: 51
  source: /note="Description of Artificial Sequence: Synthetic polypeptide"

SEQ ID NO: 580 - protein, 117 aa, Artificial Sequence
  source: /note="Description of Artificial Sequence: Synthetic polypeptide"
EVQLVESGGGLVQPGGSLILSCAASGFTFSNYGVSWVRQAPGKGLEWVSMIWADGSTHYASSLKGRFTISRDNFKNTLYLQMNSLRAEDTAVYYCAREWQHGPVAYWGQGTLVTVSS

SEQ ID NO: 581 - protein, 117 aa, Artificial Sequence
  source: /note="Description of Artificial Sequence: Synthetic polypeptide"
EVQLVESGGGLVQPGGSLRLSCAASGFTFSNYGVNWVRQAPGKGLEWVSMIRGDGFTDYASSVKGRFTISRDNSKNTLYLQMNSLRAEDTAVYYCAREWHHGPVAYWGQGTLVTVSS

SEQ ID NO: 582 - protein, 117 aa, Artificial Sequence
  source: /note="Description of Artificial Sequence: Synthetic polypeptide"
EVQLVESGGGLVQPGGSLRLSCAASGFTFSNYGVSWVRQAPGKGLEWVSMIAADGSTAYADSLKGRFTISRDNSKNTLYLQMNSLRAEDTAVYYCAREWHHGPVAYWGQGTLVTVSS

SEQ ID NO: 583 - protein, 117 aa, Artificial Sequence; identical to SEQ ID NO: 40
  source: /note="Description of Artificial Sequence: Synthetic polypeptide"

SEQ ID NO: 584 - protein, 117 aa, Artificial Sequence
  source: /note="Description of Artificial Sequence: Synthetic polypeptide"
EVQLVESGGGLVQPGGSLRLSCAASGFTFSNYGVTWVRQAPGKGLEWVSMIRGDGSTDYADTVKGRFTISRDNSKNTLYLQMNSLRAEDTAVYYCAREWHHGPVAYWGQGTLVTVSS

SEQ ID NO: 585 - protein, 117 aa, Artificial Sequence
  source: /note="Description of Artificial Sequence: Synthetic polypeptide"
EVQLVESGGGLVQPGGSLRLSCAASGFTFSNYGVSWVRQAPGKGLEWVSIISGDGFTDYASSVKGRFTISRDNSKNTLYLQMNSLRAEDTAVYYCAREWHHGPVAYWGQGTLVTVSS

SEQ ID NO: 586 - protein, 117 aa, Artificial Sequence
  source: /note="Description of Artificial Sequence: Synthetic polypeptide"
EVQLVESGGGLVQPGGSLRLSCAASGFTFSDWGVHWMRQAPGKGLEWVSTIWDDGSTYYASSVKSRFTISRDNSKNTLYLQMNSLRAEDTAVYYCARHGHHGPFVYWGQGTLVTVSS

SEQ ID NO: 587 - protein, 117 aa, Artificial Sequence
  source: /note="Description of Artificial Sequence: Synthetic polypeptide"
  MOD_RES (26)..(26): Any amino acid
EVQLVESGGGLVQPGGSLRLSCAASXFTFSNFGVNWVRQAPGKGLEWVSMIWGDGSTDYADSVKSRFTISRDNSKNTLYLQMNSLRAEDTAVYYCAREWHHGPVAYWGQGTLVTVSS

SEQ ID NO: 588 - protein, 117 aa, Artificial Sequence
  source: /note="Description of Artificial Sequence: Synthetic polypeptide"
EVQLVESGGGLVQPGGSLRLSCAASGFTFSVYGVNWVRQAPGKGLEWVSMIGDEGSTDYASTVKGRFTISRDNSKNTLYLQMNSLRAEDTAVYYCARHWHHGAVDYWGQGTLVTVSS

SEQ ID NO: 589 - protein, 117 aa, Artificial Sequence
  source: /note="Description of Artificial Sequence: Synthetic polypeptide"
EVQLVESGGGLVQPGGSLRLSCAASGFTFSDYGVNWVRQAPGKGLEWVSMIWADGSTHYADSLKSRFTISRDNSKNTLYLQMNSLRAEDTAVYYCAREWHHGPVAYWGQGTLVTVSS

SEQ ID NO: 590 - protein, 117 aa, Artificial Sequence; identical to SEQ ID NO: 45
  source: /note="Description of Artificial Sequence: Synthetic polypeptide"

SEQ ID NO: 591 - protein, 117 aa, Artificial Sequence; identical to SEQ ID NO: 53
  source: /note="Description of Artificial Sequence: Synthetic polypeptide"

SEQ ID NO: 592 - protein, 117 aa, Artificial Sequence
  source: /note="Description of Artificial Sequence: Synthetic polypeptide"
EVQLVESGGGLVQPGGSLRLSCAASGFTFSNYGVTWVRQAPGKGLEWVSMIRGDGFTDYASSVKGRFTISRDNSKNTLYLQMNSLRAEDTAVYYCAREWQHGPVAYWGQGTLVTVSS

SEQ ID NO: 593 - protein, 117 aa, Artificial Sequence
  source: /note="Description of Artificial Sequence: Synthetic polypeptide"
EVQLVESGGGLVQPGGSLRLSCAASGFTFSNYGVTWVRQAPGKGLEWVSMIRADGYTSYASSVKGRFTISRDNSKNTLYLQMNSLRAEDTAVYYCAREWHHGPVAYWGQGTLVTVSS

SEQ ID NO: 594 - protein, 117 aa, Artificial Sequence; identical to SEQ ID NO: 43
  source: /note="Description of Artificial Sequence: Synthetic polypeptide"

SEQ ID NO: 595 - protein, 117 aa, Artificial Sequence
  source: /note="Description of Artificial Sequence: Synthetic polypeptide"
EVQLVESGGGLVQPGGSLRLSCAASGFTFSNYGVNWVRQAPGKGLEWVSMIRADGSTDYASSVKSRFTISRDNSKNTLYLQMNSLRAEDTAVYYCAREWHHGPVAYWGQGTLVTVSS

SEQ ID NO: 596 - protein, 117 aa, Artificial Sequence
  source: /note="Description of Artificial Sequence: Synthetic polypeptide"
EVQLVESGGGLVQPGGSLRLSCAASGFTFSNYGVTWVRQAPGKGLEWVSMIRADGTTDYASSVKSRFTISRDNSKNTLYLQMNSLRAEDTAVYYCAREWQHGPVGYWGQGTLVTVSS

SEQ ID NO: 597 - protein, 117 aa, Artificial Sequence
  source: /note="Description of Artificial Sequence: Synthetic polypeptide"
EVQLVESGGGLVQPGGSLRLSCAASGFTFSNFGVHWVRQAPGKGLEWVSMIWADGSTVYASSVKSRFTISRDNSKNTLYLQMNSLRAEDTAVYYCAREWHHGPVAYWGQGTLVTVSS

SEQ ID NO: 598 - protein, 117 aa, Artificial Sequence
  source: /note="Description of Artificial Sequence: Synthetic polypeptide"
EVQLVESGGGLVQPGGSLRLSCAASGFTFSNYGVTWVRQAPGKGLEWVSMIGSDGSTYYADSLKSRFTISRDNSKNTLYLQMNSLRAEDTAVYYCAREWHHGPVAYWGQGTLVTVSS

SEQ ID NO: 599 - protein, 117 aa, Artificial Sequence
  source: /note="Description of Artificial Sequence: Synthetic polypeptide"
EVQLVESGGGLVQPGGSLRLSCAASGFTFSNYGVTWVRQAPGKGLEWVSMIRGDGFTDYASSVKGRFTISRDNSKNTLYLQMNSLRAEDTAVYYCAREWQHGPLGYWGQGTLVTVSS

SEQ ID NO: 600 - protein, 117 aa, Artificial Sequence
  source: /note="Description of Artificial Sequence: Synthetic polypeptide"
EVQLVESGGGLVQPGGSLRLSCAASGFTFSDFGVNWVRQAPGKGLEWVSMIWGDGHTAYASSVKSRFTISRDNSKNTLYLQMNSLRAEDTAVYYCAREWHHGPVAYWGQGTLVTVSS

SEQ ID NO: 601 - protein, 117 aa, Artificial Sequence
  source: /note="Description of Artificial Sequence: Synthetic polypeptide"
EVQLVESGGGLVQPGGSLRLSCAASGFTFSDYGVNWVRQAPGKGLEWVSMIWAHGATHYASSVKGRFTISRDNSKNTLYLQMNSLRAEDTAVYYCAREWHHGPVAYWGQGTLVTVSS

SEQ ID NO: 602 - protein, 117 aa, Artificial Sequence
  source: /note="Description of Artificial Sequence: Synthetic polypeptide"
EVQLVESGGGLVQPGGSLRLSCAASGFTFSNYGVTWVRQAPGKGLEWVSLIRDDGSTDYASTLKGRFTISRDNSKNTLYLQMNSLRAEDTAVYYCAREWHHGPVAYWGQGTLVTVSS

SEQ ID NO: 603 - protein, 117 aa, Artificial Sequence
  source: /note="Description of Artificial Sequence: Synthetic polypeptide"
EVQLVESGGGLVQPGGSLRLSCAASGFTFSNYGVTWVRQAPGKGLEWVSMIWGDGSTDYADSVKSRFTISRDNSKNTLYLQMNSLRAEDTAVYYCAREWHHGPVAYWGQGTLVTVSS

SEQ ID NO: 604 - protein, 117 aa, Artificial Sequence; identical to SEQ ID NO: 44
  source: /note="Description of Artificial Sequence: Synthetic polypeptide"

SEQ ID NO: 605 - protein, 117 aa, Artificial Sequence
  source: /note="Description of Artificial Sequence: Synthetic polypeptide"
EVQLVESGGGLVQPGGSLRLSCAASGFTFSNYGVSWVRQAPGKGLEWVSMISADGYTDYADSLKSRFTISRDNSKNTLYLQMNSLRAEDTAVYYCAREWQHGPVAYWGQGTLVTVSS

SEQ ID NO: 606 - protein, 117 aa, Artificial Sequence
  source: /note="Description of Artificial Sequence: Synthetic polypeptide"
EVQLVESGGGLVQPGGSLRLSCAASGFTFSNYGVSWVRQAPGKGLEWVSMIWADGSTHYASSLKGRFTISRDNSKNTLYLQMNSLRAEDTAVYYCAREWHHGPVAYWGQGTLVTVSS

SEQ ID NO: 607 - protein, 117 aa, Artificial Sequence
  source: /note="Description of Artificial Sequence: Synthetic polypeptide"
EVQLVESGGGLVQPGGSLRLSCAASGFTFSNYGVNWVRQAPGKGLEWVSMIGADGYTDYASTVKGRFTISRDNSKNTLYLQMNSLRAEDTAVYYCAREWHHGPVAYWGQGTLVTVSS

SEQ ID NO: 608 - protein, 117 aa, Artificial Sequence
  source: /note="Description of Artificial Sequence: Synthetic polypeptide"
EVQLVESGGGLVQPGGSLRLSCAASGFTFSAFGVSWVRQAPGKGLEWVSMIWADGSTDYADSVKSRFTISRDNSKNTLYLQMNSLRAEDTAVYYCAREWHHGPVAYWGQGTLVTVSS

SEQ ID NO: 609 - protein, 117 aa, Artificial Sequence
  source: /note="Description of Artificial Sequence: Synthetic polypeptide"
EVQLVESGGGLVQPGGSLRLSCAASGFTFSNYGVTWVRQAPGKGLEWVSLIRGDGSTDYASSLKGRFTISRDNSKNTLYLQMNSLRAEDTAVYYCAREWHHGPVAYWGQGTLVTVSS

SEQ ID NO: 610 - protein, 117 aa, Artificial Sequence
  source: /note="Description of Artificial Sequence: Synthetic polypeptide"
EVQLVESGGGLVQPGGSLRLSCAASGFTFSNYGVTWVRQAPGKGLEWVSMIWADGTTYYADSVKGRFTISRDNSKNTLYLQMNSLRAEDTAVYYCAREWQHGPLAYWGQGTLVTVSS

SEQ ID NO: 611 - protein, 117 aa, Artificial Sequence
  source: /note="Description of Artificial Sequence: Synthetic polypeptide"
EVQLVESGGGLVQPGGSLRLSCAASGFTFSNYGVQWVRQAPGKGLEWVSRISGDGSTDYASSVKGRFTISRDNSKNTLYLQMNSLRAEDTAVYYCAREWHHGPVAYWGQGTLVTVSS

SEQ ID NO: 612 - protein, 117 aa, Artificial Sequence
  source: /note="Description of Artificial Sequence: Synthetic polypeptide"
EVQLVESGGGLVQPGGSLRLSCAASGFSFSNFGVNWVRQAPGKGLEWVSMIWADGSTNYADTVKSRFTISRDNSKNTLYLQMNSLRAEDTAVYYCAREWHHGPVAYWGQGTLVTVSS

SEQ ID NO: 613 - protein, 117 aa, Artificial Sequence
  source: /note="Description of Artificial Sequence: Synthetic polypeptide"
EVQLVESGGGLVQPGGSLRLSCAASGFTFSAYGVSWVRQAPGKGLEWVSIISADGSTDYASSVKGRFTISRDNSKNTLYLQMNSLRAEDTAVYYCAREWHHGPVAYWGQGTLVTVSS

SEQ ID NO: 614 - protein, 117 aa, Artificial Sequence
  source: /note="Description of Artificial Sequence: Synthetic polypeptide"
EVQLVESGGGLVQPGGSLRLSCAASGFTFSNYGVTWVRQAPGKGLEWVSMIRGDGSTDYADSLKGRFTISRDNSKNTLYLQMNSLRAEDTAVYYCAREWQHGPVAYWGQGTLVTVSS

SEQ ID NO: 615 - protein, 117 aa, Artificial Sequence
  source: /note="Description of Artificial Sequence: Synthetic polypeptide"
EVQLVESGGGLVQPGGSLRLSCAASGFTFSNYGVNWVRQAPGKGLEWVSMIGADGYTDYADSVKGRFTISRDNSKNTLYLQMNSLRAEDTAVYYCAREWHHGPVAYWGQGTLVTVSS

SEQ ID NO: 616 - protein, 117 aa, Artificial Sequence
  source: /note="Description of Artificial Sequence: Synthetic polypeptide"
EVQLVESGGGLVQPGGSLRLSCAASGFTFSNYGVTWVRQAPGKGLEWVSIIRGDGSTDYASTVKGRFTISRDNSKNTLYLQMNSLRAEDTAVYYCAREWHHGPVAYWGQGTLVTVSS

SEQ ID NO: 617 - protein, 117 aa, Artificial Sequence
  source: /note="Description of Artificial Sequence: Synthetic polypeptide"
EVQLVESGGGLVQPGGSLRLSCAASGFTFSDYGVNWVRQAPGKGLEWVSMIWGSGATDYADSVKSRFTISRDNSKNTLYLQMNSLRAEDTAVYYCAREWHHGPVAYWGQGTLVTVSS

SEQ ID NO: 618 - protein, 117 aa, Artificial Sequence
  source: /note="Description of Artificial Sequence: Synthetic polypeptide"
EVQLVESGGGLVQPGGSLRLSCAASGFTFSNYGVTWVRQAPGKGLEWVSMISADGFTDYADSVKGRFTISRDNSKNTLYLQMNSLRAEDTAVYYCAREWQHGPVAYWGQGTLVTVSS

SEQ ID NO: 619 - protein, 117 aa, Artificial Sequence; identical to SEQ ID NO: 34
  source: /note="Description of Artificial Sequence: Synthetic polypeptide"

SEQ ID NO: 620 - protein, 117 aa, Artificial Sequence
  source: /note="Description of Artificial Sequence: Synthetic polypeptide"
EVQLVESGGGLVQPGGSLRLSCAASGFTFSNYGVTWVRQAPGKGLEWVSLIAADGSTDYASSVKGRFTISRDNSKNTLYLQMNSLRAEDTAVYYCAREWQHGPVAYWGQGTLVTVSS

SEQ ID NO: 621 - protein, 117 aa, Artificial Sequence
  source: /note="Description of Artificial Sequence: Synthetic polypeptide"
EVQLVESGGGLVQPGGSLRLSCAASGFTFSNYGVTWVRQAPGKGLEWVSIIRGDGSTAYADTVKGRFTISRDNSKNTLYLQMNSLRAEDTAVYYCAREWHHGPVAYWGQGTLVTVSS

SEQ ID NO: 622 - protein, 117 aa, Artificial Sequence
  source: /note="Description of Artificial Sequence: Synthetic polypeptide"
EVQLVESGGGLVQPGGSLRLSCAASGFTFSNYGVNWVRQAPGKGLEWVSMIWGDGNTGYASSVKGRFTISRDNSKNTLYLQMNSLRAEDTAVYYCAREWHHGPVAYWGQGTLVTVSS

SEQ ID NO: 623 - protein, 117 aa, Artificial Sequence
  source: /note="Description of Artificial Sequence: Synthetic polypeptide"
EVQLVESGGGLVQPGGSLRLSCAASGFTFSNYGVTWVRQAPGKGLEWVSMIRGDGSTDYADSVKGRFTISRDNSKNTLYLQMNSLRAEDTAVYYCAREWQHGPLAYWGQGTLVTVSS

SEQ ID NO: 624 - protein, 117 aa, Artificial Sequence
  source: /note="Description of Artificial Sequence: Synthetic polypeptide"
EVQLVESGGGLVQPGGSLRLSCAASGFTFSDYGVNWVRQAPGKGLEWVSMIWGDGSTEYADTLKGRFTISRDNSKNTLYLQMNSLRAEDTAVYYCAREWHHGPVAYWGQGTLVTVSS

SEQ ID NO: 625 - protein, 117 aa, Artificial Sequence
  source: /note="Description of Artificial Sequence: Synthetic polypeptide"
EVQLVESGGGLVQPGGSLRLSCAASGFTFSNYGVSWVRQAPGKGLEWVSMIWADGSTHYASSLKGRFTISRDNSKNTLYLQMNSLRAEDTAVYYCAREWQHGPVGYWGQGTLVTVSS

SEQ ID NO: 626 - protein, 117 aa, Artificial Sequence
  source: /note="Description of Artificial Sequence: Synthetic polypeptide"
EVQLVESGGGLVQPGGSLRLSCAASGFTFSNYGVYWVRQAPGKGLEWVSMIWDDGSTEYADSVKSRFTISRDNSKNTLYLQMNSLRAEDTAVYYCAREWHHGPVAYWGQGTLVTVSS

SEQ ID NO: 627 - protein, 117 aa, Artificial Sequence; identical to SEQ ID NO: 560
  source: /note="Description of Artificial Sequence: Synthetic polypeptide"

SEQ ID NO: 628 - protein, 117 aa, Artificial Sequence
  source: /note="Description of Artificial Sequence: Synthetic polypeptide"
EVQLVESGGGLVQPGGSLRLSCAASGFTFSGPGVNWVRQAPGKGLEWVSSIWDDGSTYYASSVKSRFTISRDNSKNTLYLQMNSLRAEDTAVYYCARHSHDGRFDYWGQGTLVTVSS

SEQ ID NO: 629 - protein, 117 aa, Artificial Sequence; identical to SEQ ID NO: 46
  source: /note="Description of Artificial Sequence: Synthetic polypeptide"

SEQ ID NO: 630 - protein, 117 aa, Artificial Sequence
  source: /note="Description of Artificial Sequence: Synthetic polypeptide"
EVQLVESGGGLVQPGGSLRLSCAASGFTFSDYGVNWVRQAPGKGLEWVSMIWGEGSTGYASSVKGRFTISRDNSKNTLYLQMNSLRAEDTAVYYCAREWHHGPVAYWGQGTLVTVSS

SEQ ID NO: 631 - protein, 117 aa, Artificial Sequence
  source: /note="Description of Artificial Sequence: Synthetic polypeptide"
EVQLVESGGGLVQPGGSLRLSCAASGFTFSNYGVSWVRQAPGKGLEWVSIIRDDGFTDYASSVKGRFTISRDNSKNTLYLQMNSLRAEDTAVYYCAREWHHGPVAYWGQGTLVTVSS

SEQ ID NO: 632 - protein, 117 aa, Artificial Sequence
  source: /note="Description of Artificial Sequence: Synthetic polypeptide"
EVQLVESGGGLVQPGGSLRLSCAASGFTFSNYGVTWVRQAPGKGLEWVSMIGGDGSTDYASSVKGRFTISRDNSKNTLYLQMNSLRAEDTAVYYCAREWQHGPVAYWGQGTLVTVSS

SEQ ID NO: 633 - protein, 117 aa, Artificial Sequence
  source: /note="Description of Artificial Sequence: Synthetic polypeptide"
EVQLVESGGGLVQPGGSLRLSCAASGFTFSDFGVNWVRQAPGKGLEWVSMIWADGTTDYDDSVKGRFTISRDNSKNTLYLQMNSLRAEDTAVYYCAREWHHGPVAYWGQGTLVTVSS

SEQ ID NO: 634 - protein, 117 aa, Artificial Sequence
  source: /note="Description of Artificial Sequence: Synthetic polypeptide"
EVQLVESGGGLVQPGGSLRLSCAASGFTFSNYGVNWVRQAPGKGLEWVSGISADGSTAYDSSLKGRFTISRDNSKNTLYLQMNSLRAEDTAVYYCAREWHHGPVAYWGQGTLVTVSS

SEQ ID NO: 635 - protein, 117 aa, Artificial Sequence
  source: /note="Description of Artificial Sequence: Synthetic polypeptide"
EVQLVESGGGLVQPGGSLRLSCAASGFTFSSYGVSWVRQAPGKGLEWVSLIRGDGSTYYASTVKGRFTISRDNSKNTLYLQMNSLRAEDTAVYYCAREWHHGPVAYWGQGTLVTVSS

SEQ ID NO: 636 - protein, 117 aa, Artificial Sequence
  source: /note="Description of Artificial Sequence: Synthetic polypeptide"
EVQLVESGGGLVQPGGSLRLSCAASGFTFSNFGVNWVRQAPGKGLEWVSMIWGDGSTDYASSVKSRFTISRDNSKNTLYLQMNSLRAEDTAVYYCAREWHHGPVAYWGQGTLVTVSS

SEQ ID NO: 637 - protein, 117 aa, Artificial Sequence
  source: /note="Description of Artificial Sequence: Synthetic polypeptide"
EVQLVESGGGLVQPGGSLRLSCAASGFTFSHFGVNWVRQAPGKGLEWVSMIWADGSTDYASSLKGRFTISRDNSKNTLYLQMNSLRAEDTAVYYCAREWHHGPVAYWGQGTLVTVSS

SEQ ID NO: 638 - protein, 117 aa, Artificial Sequence
  source: /note="Description of Artificial Sequence: Synthetic polypeptide"
EVQLVESGGGLVQPGGSLRLSCAASGFTFSNYGVSWVRQAPGKGLEWVSMIWADGSTHYASSLKGRFTISRDNSKNTLYLQMNSLRAEDTAVYYCAREWQHGPAAYWGQGTLVTVSS

SEQ ID NO: 639 - protein, 117 aa, Artificial Sequence
  source: /note="Description of Artificial Sequence: Synthetic polypeptide"
EVQLVESGGGLVQPGGSLRLSCAASGFTFSNYGVHWVRQAPGKGLEWVSMIAGDGSTDYASSVKSRFTISRDNSKNTLYLQMNSLRAEDTAVYYCAREWQHGPVGYWGQGTLVTVSS

SEQ ID NO: 640 - protein, 117 aa, Artificial Sequence; identical to SEQ ID NO: 36
  source: /note="Description of Artificial Sequence: Synthetic polypeptide"

SEQ ID NO: 641 - protein, 117 aa, Artificial Sequence
  source: /note="Description of Artificial Sequence: Synthetic polypeptide"
EVQLVESGGGLVQPGGSLRLSCAASGFTFSNYGVTWVRQAPGKGLEWVSIIGADGATDYADSVKSRFTISRDNSKNTLYLQMNSLRAEDTAVYYCAREWQHGPLGYWGQGTLVTVSS

SEQ ID NO: 642 - protein, 117 aa, Artificial Sequence
  source: /note="Description of Artificial Sequence: Synthetic polypeptide"
EVQLVESGGGLVQPGGSLRLSCAASGFTFSNYGVNWVRQAPGKGLEWVSGITGDGITAYASTLKSRFTISRDNSKNTLYLQMNSLRAEDTAVYYCAREWHHGPVAYWGQGTLVTVSS

SEQ ID NO: 643 - protein, 117 aa, Artificial Sequence
  source: /note="Description of Artificial Sequence: Synthetic polypeptide"
EVQLVESGGGLVQPGGSLRLSCAASGFTFSNYGVSWVRQAPGKGLEWVSMISGDGFTDYASSVKSRFTISRDNSKNTLYLQMNSLRAEDTAVYYCAREWHHGPVAYWGQGTLVTVSS

SEQ ID NO: 644 - protein, 117 aa, Artificial Sequence
  source: /note="Description of Artificial Sequence: Synthetic polypeptide"
EVQLVESGGGLVQPGGSLRLSCAASGFTFSDYGVNWVRQAPGKGLEWVSNIWGDGSTDYASSLKGRFTISRDNSKNTLYLQMNSLRAEDTAVYYCAREWHHGPVAYWGQGTLVTVSS

SEQ ID NO: 645 - protein, 117 aa, Artificial Sequence
  source: /note="Description of Artificial Sequence: Synthetic polypeptide"
EVQLVESGGGLVQPGGSLRLSCAASGFTFSNYGVNWVRQAPGKGLEWVSMIRADGSTDYADSLKGRFTISRDNSKNTLYLQMNSLRAEDTAVYYCAREWHHGPVAYWGQGTLVTVSS

SEQ ID NO: 646 - protein, 117 aa, Artificial Sequence
  source: /note="Description of Artificial Sequence: Synthetic polypeptide"
EVQLVESGGGLVQPGGSLRLSCAASGFTFSNYGVTWVRQAPGKGLEWVSMIRGDGSTDYADSVKGRFTISRDNSKNTLYLQMNSLRAEDTAVYYCAREWHHGPVAYWGQGTLVTVSS

SEQ ID NO: 647 - protein, 117 aa, Artificial Sequence
  source: /note="Description of Artificial Sequence: Synthetic polypeptide"
EVQLVESGGGLVQPGGSLRLSCAASGFTFSAYGVSWVRQAPGKGLEWVSMIWRDGSTDYADSLKGRFTISRDNSKNTLYLQMNSLRAEDTAVYYCAREWHHGPVAYWGQGTLVTVSS

SEQ ID NO: 648 - protein, 117 aa, Artificial Sequence
  source: /note="Description of Artificial Sequence: Synthetic polypeptide"
EVQLVESGGGLVQPGGSLRLSCAASGFTFSNYGVHWVRQAPGKGLEWVSMIWGDGSTHYASSVKSRFTISRDNSKNTLYLQMNSLRAEDTAVYYCAREWHHGPVAYWGQGTLVTVSS

SEQ ID NO: 649 - protein, 117 aa, Artificial Sequence
  source: /note="Description of Artificial Sequence: Synthetic polypeptide"
EVQLVESGGGLVQPGGSLRLSCAASGFTFSNYGVHWVRQAPGKGLEWVSGISADGSTDYASSVKSRFTISRDNSKNTLYLQMNSLRAEDTAVYYCAREWHHGPVAYWGQGTLVTVSS

SEQ ID NO: 650 - protein, 117 aa, Artificial Sequence
  source: /note="Description of Artificial Sequence: Synthetic polypeptide"
EVQLVESGGGLVQPGGSLRLSCAASGFTFSHYGVNWVRQAPGKGLEWVSMIGGDGFTDYASSVKGRFTISRDNSKNTLYLQMNSLRAEDTAVYYCAREWHHGPVAYWGQGTLVTVSS

SEQ ID NO: 651 - protein, 117 aa, Artificial Sequence
  source: /note="Description of Artificial Sequence: Synthetic polypeptide"
EVQLVESGGGLVQPGGSLRLSCAASGFTFSNYGVNWVRQAPGKGLEWVSMIRADGSTDYASSLKSRFTISRDNSKNTLYLQMNSLRAEDTAVYYCAREWHHGPVAYWGQGTLVTVSS

SEQ ID NO: 652 - protein, 117 aa, Artificial Sequence
  source: /note="Description of Artificial Sequence: Synthetic polypeptide"
EVQLVESGGGLVQPGGSLRLSCAASGFTFSNYGVQWVRQAPGKGLEWVSVISADGFTDYASSVKGRFTISRDNSKNTLYLQMNSLRAEDTAVYYCAREWHHGPVAYWGQGTLVTVSS

SEQ ID NO: 653 - protein, 117 aa, Artificial Sequence
  source: /note="Description of Artificial Sequence: Synthetic polypeptide"
EVQLVESGGGLVQPGGSLRLSCAASGFTFSNYGVTWVRQAPGKGLEWVSMIGADGSTDYASSVKSRFTISRDNSKNTLYLQMNSLRAEDTAVYYCAREWQHGPVGYWGQGTLVTVSS

SEQ ID NO: 654 - protein, 117 aa, Artificial Sequence; identical to SEQ ID NO: 37
  source: /note="Description of Artificial Sequence: Synthetic polypeptide"

SEQ ID NO: 655 - protein, 117 aa, Artificial Sequence
  source: /note="Description of Artificial Sequence: Synthetic polypeptide"
EVQLVESGGGLVQPGGSLRLSCAASGFTFSNYGVSWVRQAPGKGLEWVSLIRGDGYTDYASSVKGRFTISRDNSKNTLYLQMNSLRAEDTAVYYCAREWHHGPVAYWGQGTLVTVSS

SEQ ID NO: 656 - protein, 117 aa, Artificial Sequence
  source: /note="Description of Artificial Sequence: Synthetic polypeptide"
EVQLVESGGGLVQPGGSLRLSCAASGFTFSHYGVSWVRQAPGKGLEWVSVIRADGVTDYASSVKGRFTISRDNSKNTLYLQMNSLRAEDTAVYYCAREWQHGPVGYWGQGTLVTVSS

SEQ ID NO: 657 - protein, 117 aa, Artificial Sequence; identical to SEQ ID NO: 41
  source: /note="Description of Artificial Sequence: Synthetic polypeptide"

SEQ ID NO: 658 - protein, 117 aa, Artificial Sequence
  source: /note="Description of Artificial Sequence: Synthetic polypeptide"
EVQLVESGGGLVQPGGSLRLSCAASGFTFSNYGVQWVRQAPGKGLEWVSRINGDGSTDYASTLKGRFTISRDNSKNTLYLQMNSLRAEDTAVYYCAREWHHGPVAYWGQGTLVTVSS

SEQ ID NO: 659 - protein, 117 aa, Artificial Sequence
  source: /note="Description of Artificial Sequence: Synthetic polypeptide"
EVQLVESGGGLVQPGGSLRLSCAASGFTFSNYGVNWVRQAPGKGLEWVSMIRSDGFTDYASSVKGRFTISRDNSKNTLYLQMNSLRAEDTAVYYCAREWHHGPVAYWGQGTLVTVSS

SEQ ID NO: 660 - protein, 117 aa, Artificial Sequence
  source: /note="Description of Artificial Sequence: Synthetic polypeptide"
EVQLVESGGGLVQPGGSLRLSCAASGFTFSNFGVNWVRQAPGKGLEWVSMIWVDGSTDYADSVKSRFTISRDNSKNTLYLQMNSLRAEDTAVYYCAREWHHGPVAYWGQGTLVTVSS

SEQ ID NO: 661 - protein, 117 aa, Artificial Sequence
  source: /note="Description of Artificial Sequence: Synthetic polypeptide"
EVQLVESGGGLVQPGGSLRLSCAASGFTFSDYGVNWVRQAPGKGLEWVSMIWGDGSTYYASSVKSRFTISRDNSKNTLYLQMNSLRAEDTAVYYCAREWHHGPVAYWGQGTLVTVSS

SEQ ID NO: 662 - protein, 117 aa, Artificial Sequence
  source: /note="Description of Artificial Sequence: Synthetic polypeptide"
EVQLVESGGGLVQPGGSLRLSCAASGFTFSHYGVSWVRQAPGKGLEWVSMIRSDGFTDYASTVKGRFTISRDNSKNTLYLQMNSLRAEDTAVYYCAREWHHGPVAYWGQGTLVTVSS

SEQ ID NO: 663 - protein, 117 aa, Artificial Sequence
  source: /note="Description of Artificial Sequence: Synthetic polypeptide"
EVQLVESGGGLVQPGGSLRLSCAASGFTFSNYGVTWVRQAPGKGLEWVSMITGDGYTDYADTVKGRFTISRDNSKNTLYLQMNSLRAEDTAVYYCAREWQHGPLAYWGQGTLVTVSS

SEQ ID NO: 664 - protein, 117 aa, Artificial Sequence
  source: /note="Description of Artificial Sequence: Synthetic polypeptide"
EVQLVESGGGLVQPGGSLRLSCAASGFTFSNYGVSWVRQAPGKGLEWVSIIRADGLTDYADSVKSRFTISRDNSKNTLYLQMNSLRAEDTAVYYCAREWHHGPVAYWGQGTLVTVSS

SEQ ID NO: 665 - protein, 117 aa, Artificial Sequence
  source: /note="Description of Artificial Sequence: Synthetic polypeptide"
EVQLVESGGGLVQPGGSLRLSCAASGFTFSNYGVSWVRQAPGKGLEWVSLIRSDGSTDYASSVKSRFTISRDNSKNTLYLQMNSLRAEDTAVYYCAREWHHGPVAYWGQGTLVTVSS

SEQ ID NO: 666 - protein, 117 aa, Artificial Sequence
  source: /note="Description of Artificial Sequence: Synthetic polypeptide"
EVQLVESGGGLVQPGGSLRLSCAASGFTFSNYGVTWVRQAPGKGLEWVSMIRADGSTDYADSVKGRFTISRDNSKNTLYLQMNSLRAEDTAVYYCAREWQHGPLAYWGQGTLVTVSS

SEQ ID NO: 667 - protein, 117 aa, Artificial Sequence
  source: /note="Description of Artificial Sequence: Synthetic polypeptide"
EVQLVESGGGLVQPGGSLRLSCAASGFTFSDYGVIWVRQAPGKGLEWVSMIGGDGSTYYDSSLKGRFTISRDNSKNTLYLQMNSLRAEDTAVYYCAREWHHGPVAYWGQGTLVTVSS

SEQ ID NO: 668 - protein, 117 aa, Artificial Sequence
  source: /note="Description of Artificial Sequence: Synthetic polypeptide"
EVQLVESGGGLVQPGGSLRLSCAASGFTFSNYGVNWVRQAPGKGLEWVSMIGSDGSTDYASSVKGRFTISRDNSKNTLYLQMNSLRAEDTAVYYCAREWHHGPVAYWGQGTLVTVSS

SEQ ID NO: 669 - protein, 117 aa, Artificial Sequence
  source: /note="Description of Artificial Sequence: Synthetic polypeptide"
EVQLVESGGGLVQPGGSLRLSCAASGFTFSYYGVHWVRQAPGKGLEWVSGISGEGSTDYASSVKGRFTISRDNSKNTLYLQMNSLRAEDTAVYYCAREWHHGPVAYWGQGTLVTVSS

SEQ ID NO: 670 - protein, 117 aa, Artificial Sequence
  source: /note="Description of Artificial Sequence: Synthetic polypeptide"
EVQLVESGGGLVQPGGSLRLSCAASGFTFSNYGVTWVRQAPGKGLEWVSMIRGDGSTYYASSVKSRFTISRDNSKNTLYLQMNSLRAEDTAVYYCAREWHHGPVAYWVKGTLVTVSS

SEQ ID NO: 671 - protein, 117 aa, Artificial Sequence
  source: /note="Description of Artificial Sequence: Synthetic polypeptide"
EVQLVESGGGLVQPGGSLRLSCAASGFTFSNYGVSWVRQAPGKGLEWVSIIRGDGSTDYASSLKSRFTISRDNSKNTLYLQMNSLRAEDTAVYYCAREWHHGPVAYWGQGTLVTVSS

SEQ ID NO: 672 - protein, 117 aa, Artificial Sequence
  source: /note="Description of Artificial Sequence: Synthetic polypeptide"
EVQLVESGGGLVQPGGSLRLSCAASGFTFSNYGVTWVRQAPGKGLEWVSMIRADGTTDYASSVKGRFTISRDNSKNTLYLQMNSLRAEDTAVYYCAREWHHGPVAYWGQGTLVTVSS

SEQ ID NO: 673 - protein, 117 aa, Artificial Sequence; identical to SEQ ID NO: 48
  source: /note="Description of Artificial Sequence: Synthetic polypeptide"

SEQ ID NO: 674 - protein, 117 aa, Artificial Sequence
  source: /note="Description of Artificial Sequence: Synthetic polypeptide"
EVQLVESGGGLVQPGGSLRLSCAASGFTFSNYGVSWVRQAPGKGLEWVSMIRGDGSTYYADTLKGRFTISRDNSKNTLYLQMNSLRAEDTAVYYCAREWHHGPVAYWGQGTLVTVSS

SEQ ID NO: 675 - protein, 117 aa, Artificial Sequence
  source: /note="Description of Artificial Sequence: Synthetic polypeptide"
EVQLVESGGGLVQPGGSLRLSCAASGFTFSHFGVNWVRQAPGKGLEWVSMIWADGSTSYADSVKSRFTISRDNSKNTLYLQMNSLRAEDTAVYYCAREWHHGPVAYWGQGTLVTVSS

SEQ ID NO: 676 - protein, 107 aa, Artificial Sequence
  source: /note="Description of Artificial Sequence: Synthetic polypeptide"
DIQMTQSPSSLSASVGDRVTITCRASQKVSSAVAWYQQKPGKAPKLLIYWASTRHTGVPSRFSGSGSGTDFTLTISSLQPEDFATYYCQQHYHTPYTFGQGTKLEIK

SEQ ID NO: 677 - protein, 107 aa, Artificial Sequence
  source: /note="Description of Artificial Sequence: Synthetic polypeptide"
DIQMTQSPSSLSASVGDRVTITCKASQAVSTEVAWYQQKPGKAPKLLIYCASTRQTGVPSRFSGSGSGTDFTLTISSLQPEDFATYYCQQSYSAPYTFGQGTKLEIK

SEQ ID NO: 678 - protein, 107 aa, Artificial Sequence
  source: /note="Description of Artificial Sequence: Synthetic polypeptide"
DIQMTQSPSSLSASVGDRVTITCRASQVVSSAVAWYQQKPGKAPKLLIYWASKRHTGVPSRFSGSGSGTDFTLTISSLQPEDFATYYCQQHYSTPFTFGQGTKLEIK

SEQ ID NO: 679 - protein, 107 aa, Artificial Sequence
  source: /note="Description of Artificial Sequence: Synthetic polypeptide"
DIQMTQSPSSLSASVGDRVTITCRASQAVSSAVAWYQQKPGKAPKLLIYWASTRHTGVPSRFSGSGSGTDFTLTISSLQPEDFATYYCQQHYSTPFTFGQGTKLEIK

SEQ ID NO: 680 - protein, 107 aa, Artificial Sequence
  source: /note="Description of Artificial Sequence: Synthetic polypeptide"
DIQMTQSPSSLSASVGDRVTITCKASQKVSSALAWYQQKPGKAPKLLIYWASALHSGVPSRFSGSGSGTDFTLTISSLQPEDFATYYCQQHYRPPFTFGQGTKLEIK

SEQ ID NO: 681 - protein, 107 aa, Artificial Sequence
  source: /note="Description of Artificial Sequence: Synthetic polypeptide"
DIQMTQSPSSLSASVGDRVTITCRASQGVSSAVAWYQQKPGKAPKLLIYWASTRHTGVPSRFSGSGSGTDFTLTISSLQPEDFATYYCQQHYTTPFTFGQGTKLEIK

SEQ ID NO: 682 - protein, 107 aa, Artificial Sequence
  source: /note="Description of Artificial Sequence: Synthetic polypeptide"
DIQMTQSPSSLSASVGDRVTITCRASQGVSRALAWYQQKPGKAPKLLIYWASTLHSGVPSRFSGSGSGTDFTLTISSLQPEDFATYYCQQHYRAPFTFGQGTKLEIK

SEQ ID NO: 683 - protein, 107 aa, Artificial Sequence
  source: /note="Description of Artificial Sequence: Synthetic polypeptide"
DIQMTQSPSSLSASVGDRVTITCRASQAVSSAVAWYQQKPGKAPKLLIYWASTRHTGVPSRFSGSGSGTDFTLTISSLQPEDFATYYCQQHYHTPFTFGQGTKLEIK

SEQ ID NO: 684 - protein, 107 aa, Artificial Sequence
  source: /note="Description of Artificial Sequence: Synthetic polypeptide"
DIQMTQSPSSLSASVGDRVTITCKASQGVSSALAWYQQKPGKAPKLLIYWASTRHSGVPSRFSGSGSGTDFTLTISSLQPEDFATYYCQQHYRTPFTFGQGTKLEIK

SEQ ID NO: 685 - protein, 107 aa, Artificial Sequence
  source: /note="Description of Artificial Sequence: Synthetic polypeptide"
DIQMTQSPSSLSASVGDRVTITCKASQGVSSALAWYQQKPGKAPKLLIYWASTRHSGVPSRFSGSGSGTDFTLTISSLQPEDFATYYCQQHYSTPYTFGQGTKLEIK

SEQ ID NO: 686 - protein, 107 aa, Artificial Sequence
  source: /note="Description of Artificial Sequence: Synthetic polypeptide"
DIQMTQSPSSLSASVGDRVTITCKASQWVSSAVAWYQQKPGKAPKLLIYWASTRQSGVPSRFSGSGSGTDFTLTISSLQPEDFATYYCQQHYRIPFTFGQGTKLEIK

SEQ ID NO: 687 - protein, 107 aa, Artificial Sequence
  source: /note="Description of Artificial Sequence: Synthetic polypeptide"
DIQMTQSPSSLSASVGDRVTITCKASQAVSSALAWYQQKPGKAPKLLIYWASTRHSGVPSRFSGSGSGTDFTLTISSLQPEDFATYYCQQHYSTPYTFGQGTKLEIK

SEQ ID NO: 688 - protein, 107 aa, Artificial Sequence
  source: /note="Description of Artificial Sequence: Synthetic polypeptide"
DIQMTQSPSSLSASVGDRVTITCKASQRVSSAVAWYQQKPGKAPKLLIYWASTLHTGVPSRFSGSGSGTDFTLTISSLQPEDFATYYCQQHYSTPYTFGQGTKLEIK

SEQ ID NO: 689 - protein, 107 aa, Artificial Sequence
  source: /note="Description of Artificial Sequence: Synthetic polypeptide"
DIQMTQSPSSLSASVGDRVTITCKASQGVSSAVAWYQQKPGKAPKLLIYWASTRHTGVPSRFSGSGSGTDFTLTISSLQPEDFATYYCQQHYNTPFTFGQGTKLEIK

SEQ ID NO: 690 - protein, 107 aa, Artificial Sequence
  source: /note="Description of Artificial Sequence: Synthetic polypeptide"
DIQMTQSPSSLSASVGDRVTITCKASQKVSSAVAWYQQKPGKAPKLLIYWASARHTGVPSRFSGSGSGTDFTLTISSLQPEDFATYYCQQHYSTPFTFGQGTKLEIK

SEQ ID NO: 691 - protein, 107 aa, Artificial Sequence
  source: /note="Description of Artificial Sequence: Synthetic polypeptide"
  MOD_RES (30)..(30): Any amino acid
DIQMTQSPSSLSASVGDRVTITCKASQTVXRAVAWYQQKPGKAPKLLIYWASTRQSGVPSRFSGSGSGTDFTLTISSLQPEDFATYYCQQSYSTPFTFGQGTKLEIK

SEQ ID NO: 692 - protein, 107 aa, Artificial Sequence
  source: /note="Description of Artificial Sequence: Synthetic polypeptide"
DIQMTQSPSSLSASVGDRVTITCRASQRVSSAVAWSQQKPGKAPKLLIYWASTRHSGVPSRFSGSGSGTDFTLTISSLQPEDFATYYCQQHYTTPYTFGQGTKLEIK

SEQ ID NO: 693 - protein, 107 aa, Artificial Sequence
  source: /note="Description of Artificial Sequence: Synthetic polypeptide"
DIQMTQSPSSLSASVGDRVTITCKASQAVSSAVAWYQQKPGKAPKLLIYWASTRHSGVPSRFSGSGSGTDFTLTISSLQPEDFATYYCQQHYSTPFTFGQGTKLEIK

SEQ ID NO: 694 - protein, 107 aa, Artificial Sequence
  source: /note="Description of Artificial Sequence: Synthetic polypeptide"
DIQMTQSPSSLSASVGDRVTITCKASQLVSSAVAWYQQKPGKAPKLLIYWASALHTGVPSRFSGSGSGTDFTLTISSLQPEDFATYYCQQHYSSPYTFGQGTKLEIK

SEQ ID NO: 695 - protein, 107 aa, Artificial Sequence
  source: /note="Description of Artificial Sequence: Synthetic polypeptide"
DIQMTQSPSSLSASVGDRVTITCKASQLVSSAVAWYQQKPGKAPKLLIYWASTRHTGVPSRFSGSGSGTDFTLTISSLQPEDFATYYCQQHYSTPFTFGQGTKLEIK

SEQ ID NO: 696 - protein, 107 aa, Artificial Sequence
  source: /note="Description of Artificial Sequence: Synthetic polypeptide"
DIQMTQSPSSLSASVGDRVTITCKASQKVSSAVAWYQQKPGKAPKLLIYWASARHSGVPSRFSGSGSGTDFTLTISSLQPEDFATYYCQQHYRSPFTFGQGTKLEIK

SEQ ID NO: 697 - protein, 107 aa, Artificial Sequence
  source: /note="Description of Artificial Sequence: Synthetic polypeptide"
DIQMTQSPSSLSASVGDRVTITCRASQAVSTALAWYQQKPGKAPKLLIYSASTLQSGVPSRFSGSGSGTDFTLTISSLQPEDFATYYCQQHYRSPFTFGQGTKLEIK

SEQ ID NO: 698 - protein, 107 aa, Artificial Sequence
  source: /note="Description of Artificial Sequence: Synthetic polypeptide"
DIQMTQSPSSLSASVGDRVTITCKASQYVGGAVAWYQQKPGKAPKLLIYQASTLQTGVPSRFSGSGSGTDFTLTISSLQPEDFATYYCQQHISKPFTFGQGTKLEIK

SEQ ID NO: 699 - protein, 107 aa, Artificial Sequence
  source: /note="Description of Artificial Sequence: Synthetic polypeptide"
DIQMTQSPSSLSASVGDRVTITCKASQLVSSAVAWYQQKPGKAPKLLIYWASTLHTGVPSRFSGSGSGTDFTLTISSLQPEDFATYYCQQHYRTPFTFGQGTKLEIK

SEQ ID NO: 700 - protein, 107 aa, Artificial Sequence
  source: /note="Description of Artificial Sequence: Synthetic polypeptide"
DIQMTQSPSSLSASVGDRVTITCKASQSVNGALAWYQQKPGKAPKLLIYRASTRQTGVPSRFSGSGSGTDFTLTISSLQPEDFATYYCQQHYSIPFTFGQGTKLEIK

SEQ ID NO: 701 - protein, 107 aa, Artificial Sequence
  source: /note="Description of Artificial Sequence: Synthetic polypeptide"
DIQMTQSPSSLSASVGDRVTITCRASQGVSSALAWYQQKPGKAPKLLIYWASALHSGVPSRFSGSGSGTDFTLTISSLQPEDFATYYCQQHYSAPFTFGQGTKLEIK

SEQ ID NO: 702 - protein, 107 aa, Artificial Sequence
  source: /note="Description of Artificial Sequence: Synthetic polypeptide"
DIQMTQSPSSLSASVGDRVTITCKASQAVSSSVAWYQQKPGKAPKLLIYGASTLQSGVPSRFSGSGSGTDFTLTISSLQPEDFATYYCQQHYNEPYTFGQGTKLEIK

SEQ ID NO: 703 - protein, 107 aa, Artificial Sequence
  source: /note="Description of Artificial Sequence: Synthetic polypeptide"
DIQMTQSPSSLSASVGDRVTITCKASQKVSSAVAWYQQKPGKAPKLLIYWASARHSGVPSRFSGSGSGTDFTLTISSLQPEDFATYYCQQHYRTPYTFGQGTKLEIK

SEQ ID NO: 704 - protein, 107 aa, Artificial Sequence
  source: /note="Description of Artificial Sequence: Synthetic polypeptide"
DIQMTQSPSSLSASVGDRVTITCRASQLVSSAVAWYQQKPGKAPKLLIYWASTRHSGVPSRFSGSGSGTDFTLTISSLQPEDFATYYCQQHYRTPFSFGQGTKLEIK

SEQ ID NO: 705 - protein, 107 aa, Artificial Sequence
  source: /note="Description of Artificial Sequence: Synthetic polypeptide"
DIQMTQSPSSLSASVGDRVTITCRASQAVSSAVAWYQQKPGKAPKLLIYWASKRQTGVPSRFSGSGSGTDFTLTISSLQPEDFATYYCQQHYISPYTFGQGTKLEIK

SEQ ID NO: 706 - protein, 107 aa, Artificial Sequence
  source: /note="Description of Artificial Sequence: Synthetic polypeptide"
DIQMTQSPSSLSASVGDRVTITCKASQGVRSALAWYQQKPGKAPKLLIYWASTRHTGVPSRFSGSGSGTDFTLTISSLQPEDFATYYCQQSYSAPYTFGQGTKLEIK

SEQ ID NO: 707 - protein, 107 aa, Artificial Sequence
  source: /note="Description of Artificial Sequence: Synthetic polypeptide"
DIQMTQSPSSLSASVGDRVTITCKASQTVSNAVAWYQQKPGKAPKLLIYWASTRHSGVPSRFSGSGSGTDFTLTISSLQPEDFATYYCQQHYSTPFTFGQGTKLEIK

SEQ ID NO: 708 - protein, 107 aa, Artificial Sequence
  source: /note="Description of Artificial Sequence: Synthetic polypeptide"
DIQMTQSPSSLSASVGDRVTITCRASQLVSSAVAWYQQKPGKAPKLLIYWASARHTGVPSRFSGSGSGTDFTLTISSLQPEDFATYYCQQHYRTPFTFGQGTKLEIK

SEQ ID NO: 709 - protein, 107 aa, Artificial Sequence
  source: /note="Description of Artificial Sequence: Synthetic polypeptide"
DIQMTQSPSSLSASVGDRVTITCKASQPVRSAVAWYQQKPGKAPKLLIYSASTRQTGVPSRFSGSGSGTDFTLTISSLQPEDFATYYCQQSYSIPFTFGQGTKLEIK

SEQ ID NO: 710 - protein, 107 aa, Artificial Sequence
  source: /note="Description of Artificial Sequence: Synthetic polypeptide"
DIQMTQSPSSLSASVGDRVTITCRASQLVSSAVAWYQQKPGKAPKLLIYWASARHTGVPSRFSGSGSGTDFTLTISSLQPEDFATYYCQQHYKTPFSFGQGTKLEIK

SEQ ID NO: 711 - protein, 107 aa, Artificial Sequence
  source: /note="Description of Artificial Sequence: Synthetic polypeptide"
DIQMTQSPSSLSASVGDRVTITCRASQAVSSAVAWYQQKPGKAPKLLIYWASSRHTGVPSRFSGSGSGTDFTLTISSLQPEDFATYYCQQHYSTPFTFGQGTKLEIK

SEQ ID NO: 712 - protein, 107 aa, Artificial Sequence
  source: /note="Description of Artificial Sequence: Synthetic polypeptide"
DIQMTQSPSSLSASVGDRVTITCKASQTVGRAVAWYQQKPGKAPKLLIYWASTRQSGVPSRFSGSGSGTDFTLTISSLQPEDFATYYCQQSYSTPFTFGQGTKLEIK

SEQ ID NO: 713 - protein, 107 aa, Artificial Sequence
  source: /note="Description of Artificial Sequence: Synthetic polypeptide"
DIQMTQSPSSLSASVGDRVTITCRASQLVSSAVAWYQQKPGKAPKLLIYWASTRHTGVPSRFSGSGSGTDFTLTISSLQPEDFATYYCQQHYRTPFTFGQGTKLEIK

SEQ ID NO: 714 - protein, 107 aa, Artificial Sequence
  source: /note="Description of Artificial Sequence: Synthetic polypeptide"
DIQMTQSPSSLSASVGDRVTITCRASQKVSNAVAWYQQKPGKAPKLLIYWASTRHTGVPSRFSGSGSGTDFTLTISSLQPEDFATYYCQQHYNSPFTFGQGTKLEIK

SEQ ID NO: 715 - protein, 107 aa, Artificial Sequence
  source: /note="Description of Artificial Sequence: Synthetic polypeptide"
DIQMTQSPSSLSASVGDRVTITCRASQLVSSAVAWYQQKPGKAPKLLIYWASARHTGVPSRFSGSGSGTDFTLTISSLQPEDFATYYCQQHYKTPFTFGQGTKLEIK

SEQ ID NO: 716 - protein, 107 aa, Artificial Sequence
  source: /note="Description of Artificial Sequence: Synthetic polypeptide"
DIQMTQSPSSLSASVGDRVTITCRASQRVSSAVAWYQQKPGKAPKLLIYWASTRHSGVPSRFSGSGSGTDFTLTISSLQPEDFATYYCQQHYTTPYTFGQGTKLEIK

SEQ ID NO: 717 - protein, 107 aa, Artificial Sequence
  source: /note="Description of Artificial Sequence: Synthetic polypeptide"
DIQMTQSPSSLSASVGDRVTITCKASQRVSSAVAWYQQKPGKAPKLLIYWASNRHSGVPSRFSGSGSGTDFTLTISSLQPEDFATYYCQQHYSTPFTFGQGTKLEIK

SEQ ID NO: 718 - protein, 107 aa, Artificial Sequence
  source: /note="Description of Artificial Sequence: Synthetic polypeptide"
DIQMTQSPSSLSASVGDRVTITCKASQLVSSALAWYQQKPGKAPKLLIYWASTRQSGVPSRFSGSGSGTDFTLTISSLQPEDFATYYCQQHYRTPFTFGQGTKLEIK

SEQ ID NO: 719 - protein, 107 aa, Artificial Sequence
  source: /note="Description of Artificial Sequence: Synthetic polypeptide"
DIQMTQSPSSLSASVGDRVTITCKASQLVSSALAWYQQKPGKAPKLLIYWASTRHTGVPSRFSGSGSGTDFTLTISSLQPEDFATYYCQQHYRNPFTFGQGTKLEIK

SEQ ID NO: 720 - protein, 107 aa, Artificial Sequence
  source: /note="Description of Artificial Sequence: Synthetic polypeptide"
  MOD_RES (41)..(41): Any amino acid
DIQMTQSPSSLSASVGDRVTITCKASQAVSSALAWYQQKPXKAPKLLIYWASSRQSGVPSRFSGSGSGTDFTLTISSLQPEDFATYYCQQHYRTPFTFGQGTKLEIK

SEQ ID NO: 721 - protein, 107 aa, Artificial Sequence
  source: /note="Description of Artificial Sequence: Synthetic polypeptide"
DIQMTQSPSSLSASVGDRVTITCRASQLVSSAVAWYQQKPGKAPKLLIYWASTLHTGVPSRFSGSGSGTDFTLTISSLQPEDFATYYCQQHYRTPFTFGQGTKLEIK

SEQ ID NO: 722 - protein, 107 aa, Artificial Sequence
  source: /note="Description of Artificial Sequence: Synthetic polypeptide"
DIQMTQSPSSLSASVGDRVTITCRASQLVSSAVAWYQQKPGKAPKLLIYWASTRHSGVPSRFSGSGSGTDFTLTISSLQPEDFATYYCQQHYRTPFTFGQGTKLEIK

SEQ ID NO: 723 - protein, 107 aa, Artificial Sequence
  source: /note="Description of Artificial Sequence: Synthetic polypeptide"
DIQMTQSPSSLSASVGDRVTITCKASQPVSGAVAWYQQKPGKAPKLLIYWASTRHTGVPSRFSGSGSGTDFTLTISSLQPEDFATYYCQQHYRASYTFGQGTKLEIK

SEQ ID NO: 724 - protein, 107 aa, Artificial Sequence
  source: /note="Description of Artificial Sequence: Synthetic polypeptide"
DIQMTQSPSSLSASVGDRVTITCRASQKVSSAVAWYQQKPGKAPKLLIYWASARHTGVPSRFSGSGSGTDFTLTISSLQPEDFATYYCQQHYRTPYTFGQGTKLEIK

SEQ ID NO: 725 - protein, 107 aa, Artificial Sequence; identical to SEQ ID NO: 716
  source: /note="Description of Artificial Sequence: Synthetic polypeptide"

SEQ ID NO: 726 - protein, 107 aa, Artificial Sequence
  source: /note="Description of Artificial Sequence: Synthetic polypeptide"
DIQMTQSPSSLSASVGDRVTITCRASQLVSSAVAWYQQKPGKAPKLLIYWASTLHSGVPSRFSGSGSGTDFTLTISSLQPEDFATYYCQQHYSTPFTFGQGTKLEIK

SEQ ID NO: 727 - protein, 107 aa, Artificial Sequence
  source: /note="Description of Artificial Sequence: Synthetic polypeptide"
DIQMTQSPSSLSASVGDRVTITCRASQAVSSAVAWYQQKPGKAPKLLIYWASARHTGVPSRFSGSGSGTDFTLTISSLQPEDFATYYCQQHYSSPYTFGQGTKLEIK

SEQ ID NO: 728 - protein, 107 aa, Artificial Sequence
  source: /note="Description of Artificial Sequence: Synthetic polypeptide"
DIQMTQSPSSLSASVGDRVTITCKASQPVSSAVAWYQQKPGKAPKLLIYWASTLHSGVPSRFSGSGSGTDFTLTISSLQPEDFATYYCQQHYRTPFTFGQGTKLEIK

SEQ ID NO: 729 - protein, 107 aa, Artificial Sequence
  source: /note="Description of Artificial Sequence: Synthetic polypeptide"
DIQMTQSPSSLSASVGDRVTITCRASQLVSSAVAWYQQKPGKAPKLLIYWASTRHTGVPSRFSGSGSGTDFTLTISSLQPEDFATYYCQQHYRTPYTFGQGTNLEIK

SEQ ID NO: 730 - protein, 107 aa, Artificial Sequence
  source: /note="Description of Artificial Sequence: Synthetic polypeptide"
DIQMTQSPSSLSASVGDIVTITCKASQLVSSAVAWYQQKPGKAPKLLIYWASTRHTGVPSRFSGSGSGTDFTLTISSLQPEDFATYYCQQHYRTPYTFGQGTKLEIK

SEQ ID NO: 731 - protein, 107 aa, Artificial Sequence
  source: /note="Description of Artificial Sequence: Synthetic polypeptide"
DIQMTQSPSSLSASVGDRVTITCKASQLVSSAVAWYQQKPGKAPKLLIYWASMRHSGVPSRFSGSGSGTDFTLTISSLQPEDFATYYCQQHYSSPFTFGQGTKLEIK

SEQ ID NO: 732 - protein, 107 aa, Artificial Sequence
  source: /note="Description of Artificial Sequence: Synthetic polypeptide"
DIQMTQSPSSLSASVGDRVTITCKASQTVSSAVAWYQQKPGKAPKLLIYWASTRHSGVPSRFSGSGSGTDFTLTISSLQPEDFATYYCQQHYRAPYTFGQGTKLEIK

SEQ ID NO: 733 - protein, 107 aa, Artificial Sequence
  source: /note="Description of Artificial Sequence: Synthetic polypeptide"
DIQMTQSPSSLSASVGDRVTITCKASQRVSSALAWYQQKPGKAPKLLIYWASTRHTGVPSRFSGSGSGTDFTLTISSLQPEDFATYYCQQHYSTPFTFGQGTKLEIK

SEQ ID NO: 734 - protein, 107 aa, Artificial Sequence
  source: /note="Description of Artificial Sequence: Synthetic polypeptide"
DIQMTQSPSSLSASVGDRVTITCRASQLVSNAVAWYQQKPGKAPKLLIYWASTRHTGVPSRFSGSGSGTDFTLTISSLQPEDFATYYCQQHYSSPFTFGQGTKLEIK

SEQ ID NO: 735 - protein, 107 aa, Artificial Sequence
  source: /note="Description of Artificial Sequence: Synthetic polypeptide"
DIQMTQSPSSLSASVGDRVTITCRASQLVSSAVAWYQQKPGKAPKLLIYWASARHSGVPSRFSGSGSGTDFTLTISSLQPEDFATYYCQQHYSTPFTFGQGTKLEIK

SEQ ID NO: 736 - protein, 107 aa, Artificial Sequence
  source: /note="Description of Artificial Sequence: Synthetic polypeptide"
DIQMTQSPSSLSASVGDRVTITCKASQLVSSAVAWYQQKPGKAPKLLIYWASTRHSGVPSRFSGSGSGTDFTLTISSLQPEDFATYYCQQHYTTPFTFGQGTKLEIK

SEQ ID NO: 737 - protein, 107 aa, Artificial Sequence
  source: /note="Description of Artificial Sequence: Synthetic polypeptide"
DIQMTQSPSSLSASVGDRVTITCKASQRVSSAVAWYQQKPGKAPKLLIYWASTRHTGVPSRFSGSGSGTDFTLTISSLQPEDFATYYCQQHYSTPFTFGQGTKLEIK

SEQ ID NO: 738 - protein, 117 aa, Artificial Sequence; identical to SEQ ID NO: 34
  source: /note="Description of Artificial Sequence: Synthetic polypeptide"

SEQ ID NO: 739 - protein, 117 aa, Artificial Sequence; identical to SEQ ID NO: 35
  source: /note="Description of Artificial Sequence: Synthetic polypeptide"

SEQ ID NO: 740 - protein, 117 aa, Artificial Sequence; identical to SEQ ID NO: 36
  source: /note="Description of Artificial Sequence: Synthetic polypeptide"

SEQ ID NO: 741 - protein, 117 aa, Artificial Sequence; identical to SEQ ID NO: 37
  source: /note="Description of Artificial Sequence: Synthetic polypeptide"

SEQ ID NO: 742 - protein, 117 aa, Artificial Sequence; identical to SEQ ID NO: 38
  source: /note="Description of Artificial Sequence: Synthetic polypeptide"

SEQ ID NO: 743 - protein, 117 aa, Artificial Sequence; identical to SEQ ID NO: 39
  source: /note="Description of Artificial Sequence: Synthetic polypeptide"

SEQ ID NO: 744 - protein, 117 aa, Artificial Sequence; identical to SEQ ID NO: 40
  source: /note="Description of Artificial Sequence: Synthetic polypeptide"

SEQ ID NO: 745 - protein, 117 aa, Artificial Sequence; identical to SEQ ID NO: 41
  source: /note="Description of Artificial Sequence: Synthetic polypeptide"

SEQ ID NO: 746 - protein, 117 aa, Artificial Sequence; identical to SEQ ID NO: 42
  source: /note="Description of Artificial Sequence: Synthetic polypeptide"

SEQ ID NO: 747 - protein, 117 aa, Artificial Sequence; identical to SEQ ID NO: 43
  source: /note="Description of Artificial Sequence: Synthetic polypeptide"

SEQ ID NO: 748 - protein, 117 aa, Artificial Sequence; identical to SEQ ID NO: 44
  source: /note="Description of Artificial Sequence: Synthetic polypeptide"

SEQ ID NO: 749 - protein, 117 aa, Artificial Sequence; identical to SEQ ID NO: 45
  source: /note="Description of Artificial Sequence: Synthetic polypeptide"

SEQ ID NO: 750 - protein, 117 aa, Artificial Sequence; identical to SEQ ID NO: 46
  source: /note="Description of Artificial Sequence: Synthetic polypeptide"

SEQ ID NO: 751 - protein, 117 aa, Artificial Sequence; identical to SEQ ID NO: 46
  source: /note="Description of Artificial Sequence: Synthetic polypeptide"

SEQ ID NO: 752 - protein, 117 aa, Artificial Sequence; identical to SEQ ID NO: 48
  source: /note="Description of Artificial Sequence: Synthetic polypeptide"

SEQ ID NO: 753 - protein, 117 aa, Artificial Sequence; identical to SEQ ID NO: 44
  source: /note="Description of Artificial Sequence: Synthetic polypeptide"

SEQ ID NO: 754 - protein, 117 aa, Artificial Sequence; identical to SEQ ID NO: 38
  source: /note="Description of Artificial Sequence: Synthetic polypeptide"

SEQ ID NO: 755 - protein, 117 aa, Artificial Sequence; identical to SEQ ID NO: 51
  source: /note="Description of Artificial Sequence: Synthetic polypeptide"

SEQ ID NO: 756 - protein, 117 aa, Artificial Sequence; identical to SEQ ID NO: 52
  source: /note="Description of Artificial Sequence: Synthetic polypeptide"

SEQ ID NO: 757 - protein, 117 aa, Artificial Sequence; identical to SEQ ID NO: 53
  source: /note="Description of Artificial Sequence: Synthetic polypeptide"

SEQ ID NO: 758 - protein, 117 aa, Artificial Sequence; identical to SEQ ID NO: 44
  source: /note="Description of Artificial Sequence: Synthetic polypeptide"

SEQ ID NO: 759 - protein, 117 aa, Artificial Sequence; identical to SEQ ID NO: 44
  source: /note="Description of Artificial Sequence: Synthetic polypeptide"

SEQ ID NO: 760 - protein, 117 aa, Artificial Sequence; identical to SEQ ID NO: 44
  source: /note="Description of Artificial Sequence: Synthetic polypeptide"

SEQ ID NO: 761 - protein, 117 aa, Artificial Sequence; identical to SEQ ID NO: 44
  source: /note="Description of Artificial Sequence: Synthetic polypeptide"

SEQ ID NO: 762 - protein, 117 aa, Artificial Sequence; identical to SEQ ID NO: 44
  source: /note="Description of Artificial Sequence: Synthetic polypeptide"

SEQ ID NO: 763 - protein, 108 aa, Artificial Sequence; identical to SEQ ID NO: 59
  source: /note="Description of Artificial Sequence: Synthetic polypeptide"

SEQ ID NO: 764 - protein, 108 aa, Artificial Sequence; identical to SEQ ID NO: 60
  source: /note="Description of Artificial Sequence: Synthetic polypeptide"

SEQ ID NO: 765 - protein, 108 aa, Artificial Sequence; identical to SEQ ID NO: 61
  source: /note="Description of Artificial Sequence: Synthetic polypeptide"

SEQ ID NO: 766 - protein, 108 aa, Artificial Sequence; identical to SEQ ID NO: 62
  source: /note="Description of Artificial Sequence: Synthetic polypeptide"

SEQ ID NO: 767 - protein, 108 aa, Artificial Sequence; identical to SEQ ID NO: 63
  source: /note="Description of Artificial Sequence: Synthetic polypeptide"

SEQ ID NO: 768 - protein, 108 aa, Artificial Sequence; identical to SEQ ID NO: 64
  source: /note="Description of Artificial Sequence: Synthetic polypeptide"

SEQ ID NO: 769 - protein, 108 aa, Artificial Sequence; identical to SEQ ID NO: 65
  source: /note="Description of Artificial Sequence: Synthetic polypeptide"

SEQ ID NO: 770 - protein, 108 aa, Artificial Sequence; identical to SEQ ID NO: 66
  source: /note="Description of Artificial Sequence: Synthetic polypeptide"

SEQ ID NO: 771 - protein, 108 aa, Artificial Sequence; identical to SEQ ID NO: 67
  source: /note="Description of Artificial Sequence: Synthetic polypeptide"

SEQ ID NO: 772 - protein, 108 aa, Artificial Sequence; identical to SEQ ID NO: 68
  source: /note="Description of Artificial Sequence: Synthetic polypeptide"

SEQ ID NO: 773 - protein, 108 aa, Artificial Sequence; identical to SEQ ID NO: 69
  source: /note="Description of Artificial Sequence: Synthetic polypeptide"

SEQ ID NO: 774 - protein, 108 aa, Artificial Sequence; identical to SEQ ID NO: 70
  source: /note="Description of Artificial Sequence: Synthetic polypeptide"

SEQ ID NO: 775 - protein, 108 aa, Artificial Sequence; identical to SEQ ID NO: 71
  source: /note="Description of Artificial Sequence: Synthetic polypeptide"

SEQ ID NO: 776 - protein, 108 aa, Artificial Sequence; identical to SEQ ID NO: 72
  source: /note="Description of Artificial Sequence: Synthetic polypeptide"

SEQ ID NO: 777 - protein, 108 aa, Artificial Sequence; identical to SEQ ID NO: 70
  source: /note="Description of Artificial Sequence: Synthetic polypeptide"

SEQ ID NO: 778 - protein, 124 aa, Artificial Sequence
  source: /note="Description of Artificial Sequence: Synthetic polypeptide"
EVQLVQSGAEVKKPGASVKVSCKASGYTFNDYGITWVRQAPGQGLEWMGWINTYTGKPTYAQGFTGRVTMTTDTSTSTAYMELSSLRSEDTAVYFCARKFLTTVVVTDYAMDYWGQGTTVTVSS

SEQ ID NO: 779 - protein, 124 aa, Artificial Sequence
  source: /note="Description of Artificial Sequence: Synthetic polypeptide"
EVQLVQSGAEVKKPGASVKVSCKASGYTFTNYGMNWVRQAPGQGLEWMGWINTYTGEPTYADDFKGRFTFTLDTSTSTAYMELSSLRSEDTAVYFCARKFLTTVVVTDYAMDYWGQGTTVTVSS

SEQ ID NO: 780 - protein, 124 aa, Artificial Sequence
  source: /note="Description of Artificial Sequence: Synthetic polypeptide"
EVQLVQSGAEVKKPGASVKVSCKASGYTFTNYGISWVRQAPGQGLEWMGWINTYTGEPHYAQGLTGRVTMTTDTSTSTAYMELSSLRSEDTAVYFCARKFLTTVVVTDYAMDYWGQGTTVTVSS

SEQ ID NO: 781 - protein, 124 aa, Artificial Sequence
  source: /note="Description of Artificial Sequence: Synthetic polypeptide"
EVQLVQSGAEVKKPGASVKVSCKASGYTFDNYGIQWVRQAPGQGLEWMGWINTYTGAPSYAQGFTGRVTMTTDTSTSTAYMELSSLRSEDTAVYFCARKFLTTVVVTDYAMDYWGQGTTVTVSS

SEQ ID NO: 782 - protein, 124 aa, Artificial Sequence
  source: /note="Description of Artificial Sequence: Synthetic polypeptide"
EVQLVQSGAEVKKPGASVKVSCKASGYTFTDYGINWVRQAPGQGLEWMGWINTYTGKPSYAQGFTGRVTMTTDTSTSTAYMELSSLRSEDTAVYFCARKFLTTVVVTDYAMDYWGQGTTVTVSS

SEQ ID NO: 783 - protein, 124 aa, Artificial Sequence
  source: /note="Description of Artificial Sequence: Synthetic polypeptide"
EVQLVQSGAEVKKPGASVKVSCKASGYTFSNYGMNWVRQAPGQGLEWMGWINTYTGESTYAQGFTGRVTMTTDTSTSTAYMELSSLRSEDTAVYFCARKFLTTVVVTDYAMDYWGQGTTVTVSS

SEQ ID NO: 784 - protein, 124 aa, Artificial Sequence
  source: /note="Description of Artificial Sequence: Synthetic polypeptide"
EVQLVQSGAEVKKPGASVKVSCKASGYTFKNYGMTWVRQAPGQGLEWMGWINTYTGKPTYAQGFTGRVTMTTDTSTSTAYMELSSLRSEDTAVYFCARKFLTTVVVTDYAMDYWGQGTTVTVSS

SEQ ID NO: 785 - protein, 124 aa, Artificial Sequence
  source: /note="Description of Artificial Sequence: Synthetic polypeptide"
EVQLVQSGAEVKKPGASVKVSCKASGYAFTDYGINWVRQAPGQGLEWMGWINTYTGKPTYAQGFTGRVTMTTDTSTSTAYMELSSLRSEDTAVYFCARKFLTTVVVTDYAMDYWGQGTTVTVSS

SEQ ID NO: 786 - protein, 124 aa, Artificial Sequence
  source: /note="Description of Artificial Sequence: Synthetic polypeptide"
EVQLVQSGAEVKKPGASVKVSCKASGYTFNNYGINWVRQAPGQGLEWMGWINTYTGEPAYAQGFTGRVTMTTDTSTSTAYMELSSLRSEDTAVYFCARKFLTTVVVTDYAMDYWGQGTTVTVSS

SEQ ID NO: 787 - protein, 124 aa, Artificial Sequence
  source: /note="Description of Artificial Sequence: Synthetic polypeptide"
EVQLVQSGAEVKKPGASVKVSCKASGYTFRNYGINWVRQAPGQGLEWMGWINTYTGQPTYAQGFTGRVTMTTDTSTSTAYMELSSLRSEDTAVYFCARKFLTTVVVTDYAMDYWGQGTTVTVSS

SEQ ID NO: 788 - protein, 124 aa, Artificial Sequence
  source: /note="Description of Artificial Sequence: Synthetic polypeptide"
EVQLVQSGAEVKKPGASVKVSCKASGYTFTDYGINWVRQAPGQGLEWMGWINTYTGEPTYAQGFTGRVTMTTDTSTSTAYMELSSLRSEDTAVYFCARKFLTTVVVTDYAMDYWGQGTTVTVSS

SEQ ID NO: 789 - protein, 124 aa, Artificial Sequence
  source: /note="Description of Artificial Sequence: Synthetic polypeptide"
EVQLVQSGAEVKKPGASVKVSCKASGYTFKNYGIIWVRQAPGQGLEWMGWINTYTGKPTYAQGFTGRVTMTTDTSTSTAYMELSSLRSEDTAVYFCARKFLTTVVVTDYAMDYWGQGTTVTVSS

SEQ ID NO: 790 - protein, 124 aa, Artificial Sequence
  source: /note="Description of Artificial Sequence: Synthetic polypeptide"
EVQLVQSGAEVKKPGASVKVSCKASGYTFSNYGINWVRQAPGQGLEWMGWINTYTGVPTYAQGFTGRVTMTTDTSTSTAYMELSSLRSEDTAVYFCARKFLTTVVVTDYAMDYWGQGTTVTVSS

SEQ ID NO: 791 - protein, 124 aa, Artificial Sequence
  source: /note="Description of Artificial Sequence: Synthetic polypeptide"
EVQLVQSGAEVKKPGASVKVSCKASGYTFNNYGINWVRQAPGQGLEWMGWINTYTGKPSYAQGFTGRVTMTTDTSTSTAYMELSSLRSEDTAVYFCARKFLTTVVVTDYAMDYWGQGTTVTVSS

SEQ ID NO: 792 - protein, 124 aa, Artificial Sequence
  source: /note="Description of Artificial Sequence: Synthetic polypeptide"
EVQLVQSGAEVKKPGASVKVSCKASGYTFKNYGINWVRQAPGQGLEWMGWINTYTGKPTYAQGLTGRVTMTTDTSTSTAYMELSSLRSEDTAVYFCARKFLTTVVVTDYAMDYWGQGTTVTVSS

SEQ ID NO: 793 - protein, 124 aa, Artificial Sequence
  source: /note="Description of Artificial Sequence: Synthetic polypeptide"
EVQLVQSGAEVKKPGASVKVSCKASGYTFRNYGINWVRQAPGQGLEWMGWINTYTGKPSYAQGFTGRVTMTTDTSTSTAYMELSSLRSEDTAVYFCARKFLTTVVVTDYAMDYWGQGTTVTVSS

SEQ ID NO: 794 - protein, 124 aa, Artificial Sequence
  source: /note="Description of Artificial Sequence: Synthetic polypeptide"
  MOD_RES (35)..(35): Any amino acid
  MOD_RES (55)..(55): Any amino acid
EVQLVQSGAEVKKPGASVKVSCKASGYTFTNYGIXWVRQAPGQGLEWMGWINTYXGKPTYAQGFTGRVTMTTDTSTSTAYMELSSLRSEDTAVYFCARKFLTTVVVTDYAMDYWGQGTTVTVSS

SEQ ID NO: 795 - protein, 124 aa, Artificial Sequence
  source: /note="Description of Artificial Sequence: Synthetic polypeptide"
EVQLVQSGAEVKKPGASVKVSCKASGYTFNNYGINWVRQAPGQGLEWMGWINTYTGEPHYAQGLTGRVTMTTDTSTSTAYMELSSLRSEDTAVYFCARKFLTTVVVTDYAMDYWGQGTTVTVSS

SEQ ID NO: 796 - protein, 124 aa, Artificial Sequence
  source: /note="Description of Artificial Sequence: Synthetic polypeptide"
EVQLVQSGAEVKKPGASVKVSCKASGYTFTHYGINWVRQAPGQGLEWMGWINTYTGKPTYAQGFTGRVTMTTDTSTSTAYMELSSLRSEDTAVYFCARKFLTTVVVTDYAMDYWGQGTTVTVSS

SEQ ID NO: 797 - protein, 124 aa, Artificial Sequence
  source: /note="Description of Artificial Sequence: Synthetic polypeptide"
EVQLVQSGAEVKKPGASVKVSCKASGYTFTHYGINWVRQAPGQGLEWMGWINTYTGQPTYAQGLTGRVTMTTDTSTSTAYMELSSLRSEDTAVYFCARKFLTTVVVTDYAMDYWGQGTTVTVSS

SEQ ID NO: 798 - protein, 124 aa, Artificial Sequence
  source: /note="Description of Artificial Sequence: Synthetic polypeptide"
EVQLVQSGAEVKKPGASVKVSCKASGYTFTNYGITWVRQAPGQGLEWMGWINTYTGKPTYAQGFTGRVTMTTDTSTSTAYMELSSLRSEDTAVYFCARKFLTTVVVTDYAMDYWGQGTTVTVSS

SEQ ID NO: 799 - protein, 124 aa, Artificial Sequence
  source: /note="Description of Artificial Sequence: Synthetic polypeptide"
EVQLVQSGAEVKKPGASVKVSCKASGYTFGNYGINWVRQAPGQGLEWMGWINTYTGKPSYAQGFTGRVTMTTDTSTSTAYMELSSLRSEDTAVYFCARKFLTTVVVTDYAMDYWGQGTTVTVSS

SEQ ID NO: 800 - protein, 124 aa, Artificial Sequence
  source: /note="Description of Artificial Sequence: Synthetic polypeptide"
EVQLVQSGAEVKKPGASVKVSCKASGYTFSNYGINWVRQAPGQGLEWMGWINTYTGRPTYAQGFTGRVTMTTDTSTSTAYMELSSLRSEDTAVYFCARKFLTTVVVTDYAMDYWGQGTTVTVSS

SEQ ID NO: 801 - protein, 124 aa, Artificial Sequence
  source: /note="Description of Artificial Sequence: Synthetic polypeptide"
EVQLVQSGAEVKKPGASVKVSCKASGYTFKNYGINWVRQAPGQGLEWMGWINTYTGEPHYAQGFTGRVTMTTDTSTSTAYIELSSLRSEDTAVYFCARKFLTTVVVTDYAMDYWGQGTTVTVSS

SEQ ID NO: 802 - protein, 124 aa, Artificial Sequence
  source: /note="Description of Artificial Sequence: Synthetic polypeptide"
EVQLVQSGAEVKKPGASVKVSCKASGYTFTNYGINWVRQAPGQGLEWMGWINTYTGEPSYAQGFTGRVTMTTDTSTSTAYMELSSLRSEDTAVYFCARKFLTTVVVTDYAMDYWGQGTTVTVSS

SEQ ID NO: 803 - protein, 124 aa, Artificial Sequence
  source: /note="Description of Artificial Sequence: Synthetic polypeptide"
EVQLVQSGAEVKKPGASVKVSCKASGYTFSNYGMNWVRQAPGQGLEWMGWINTYTGEPTYAQGFTGRVTMTTDTSTSTAYMELSSLRSEDTAVYFCARKFLTTVVVTDYAMDYWGQGTTVTVSS

SEQ ID NO: 804 - protein, 124 aa, Artificial Sequence
  source: /note="Description of Artificial Sequence: Synthetic polypeptide"
EVQLVQSGAEVKKPGASVKVSCKASGYTFTNYGIGWVRQAPGQGLEWMGWINTYTGKPSYAQGFTGRVTMTTDTSTSTAYMELSSLRSEDTAVYFCARKFLTTVVVTDYAMDYWGQGTTVTVSS

SEQ ID NO: 805 - protein, 124 aa, Artificial Sequence
  source: /note="Description of Artificial Sequence: Synthetic polypeptide"
EVQLVQSGAEVKKPGASVKVSCKASGYTFNNYGINWVRQAPGQGLEWMGWINTYTGVPSYAQGFTGRVTMTTDTSTSTAYMELSSLRSEDTAVYFCARKFLTTVVVTDYAMDYWGQGTTVTVSS

SEQ ID NO: 806 - protein, 124 aa, Artificial Sequence
  source: /note="Description of Artificial Sequence: Synthetic polypeptide"
EVQLVQSGAEVKKPGASVKVSCKASGYTFSNYGIAWVRQAPGQGLEWMGWINTYTGVPTYAQGFTGRVTMTTDTSTSTAYMELSSLRSEDTAVYFCARKFLTTVVVTDYAMDYWGQGTTVTVSS

SEQ ID NO: 807 - protein, 124 aa, Artificial Sequence
  source: /note="Description of Artificial Sequence: Synthetic polypeptide"
EVQLVQSGAEVKKPGASVKVSCKASGYTFNNYGINWVRQAPGQGLEWMGWINTYTGVPHYAQGFTGRVTMTTDTSTSTAYMELSSLRSEDTAVYFCARKFLTTVVVTDYAMDYWGQGTTVTVSS

SEQ ID NO: 808 - protein, 124 aa, Artificial Sequence
  source: /note="Description of Artificial Sequence: Synthetic polypeptide"
  MOD_RES (35)..(35): Any amino acid
  MOD_RES (59)..(59): Any amino acid
EVQLVQSGAEVKKPGASVKVSCKASGYTFTNYGIXWVRQAPGQGLEWMGWINTYTGEPXYAQGFTGRVTMTTDTSTSTAYMELSSLRSEDTAVYFCARKFLTTVVVTDYAMDYWGQGTTVTVSS

SEQ ID NO: 809 - protein, 124 aa, Artificial Sequence
  source: /note="Description of Artificial Sequence: Synthetic polypeptide"
EVQLVQSGAEVKKPGASVKVSCKASGYTFNNYGINWVRQAPGQGLEWMGWINTYTGVPTYAQGLTGRVTMTTDTSTSTAYMELSSLRSEDTAVYFCARKFLTTVVVTDYAMDYWGQGTTVTVSS

SEQ ID NO: 810 - protein, 124 aa, Artificial Sequence
  source: /note="Description of Artificial Sequence: Synthetic polypeptide"
EVQLVQSGAEVKKPGASVKVSCKASGYTFTNYGINWVRQAPGQGLEWMGWINTYTGQPTYAQGFTGRVTMTTDTSTSTAYMELSSLRSEDTAVYFCARKFLTTVVVTDYAMDYWGQGTTVTVSS

SEQ ID NO: 811 - protein, 124 aa, Artificial Sequence
  source: /note="Description of Artificial Sequence: Synthetic polypeptide"
EVQLVQSGAEVKKPGASVKVSCKASGYTFTDYGITWVRQAPGQGLEWMGWINTYTGKPTYAQGFTGRVTMTTDTSTSTAYMELSSLRSEDTAVYFCARKFLTTVVVTDYAMDYWGQGTTVTVSS

SEQ ID NO: 812 - protein, 124 aa, Artificial Sequence
  source: /note="Description of Artificial Sequence: Synthetic polypeptide"
EVQLVQSGAEVKKPGASVKVSCKASGYTFTNYGINWVRQAPGQGLEWMGWINTYTGVPQYAQGFTGRVTMTTDTSTSTAYMELSSLRSEDTAVYFCARKFLTTVVVTDYAMDYWGQGTTVTVSS

SEQ ID NO: 813 - protein, 124 aa, Artificial Sequence
  source: /note="Description of Artificial Sequence: Synthetic polypeptide"
EVQLVQSGAEVKKPGASVKVSCKASGYTFQNYGINWVRQAPGQGLEWMGWINTYTGVPTYAQGLTGRVTMTTDTSTSTAYMELSSLRSEDTAVYFCARKFLTTVVVTDYAMDYWGQGTTVTVSS

SEQ ID NO: 814 - protein, 124 aa, Artificial Sequence
  source: /note="Description of Artificial Sequence: Synthetic polypeptide"
EVQLVQSGAEVKKPGASVKVSCKASGYTFTQYGINWVRQAPGQGLEWMGWINTYTGDPHYAQGFTGRVTMTTDTSTSTAYMELSSLRSEDTAVYFCARKFLTTVVVTDYAMDYWGQGTTVTVSS

SEQ ID NO: 815 - protein, 124 aa, Artificial Sequence
  source: /note="Description of Artificial Sequence: Synthetic polypeptide"
EVQLVQSGAEVKKPGASVKVSCKASGYTFSNYGINWVRQAPGQGLEWMGWINTYTGLPTYAQGFTGRVTMTTDTSTSTAYMELSSLRSEDTAVYFCARKFLTTVVVTDYAMDYWGQGTTVTVSS

SEQ ID NO: 816 - protein, 124 aa, Artificial Sequence
  source: /note="Description of Artificial Sequence: Synthetic polypeptide"
EVQLVQSGAEVKKPGASVKVSCKASGYTFTNYGMNWVRQAPGQGLEWMGWINTYNGKPMYAQGFTGRVTMTTDTSTSTAYMELSSLRSEDTAVYFCARKFLTTVVVTDYAMDYWGQGTTVTVSS

SEQ ID NO: 817 - protein, 124 aa, Artificial Sequence
  source: /note="Description of Artificial Sequence: Synthetic polypeptide"
EVQLVQSGAEVKKPGASVKVSCKASGYTFRNYGITWVRQAPGQGLEWMGWINTYTGEPAYAQGLTGRVTMTTDTSTSTAYMELSSLRSEDTAVYFCARKFLTTVVVTDYAMDYWGQGTTVTVSS

SEQ ID NO: 818 - protein, 124 aa, Artificial Sequence
  source: /note="Description of Artificial Sequence: Synthetic polypeptide"
EVQLVQSGAEVKKPGASVKVSCKASGYTFNHYGINWVRQAPGQGLEWMGWINTYTGRPTYAQGFTGRVTMTTDTSTSTAYMELSSLRSEDTAVYFCARKFLTTVVVTDYAMDYWGQGTTVTVSS

SEQ ID NO: 819 - protein, 124 aa, Artificial Sequence
  source: /note="Description of Artificial Sequence: Synthetic polypeptide"
EVQLVQSGAEVKKPGASVKVSCKASGYTFSNYGINWVRQAPGQGLEWMGWINTYTGKPTYAQGLTGRVTMTTDTSTSTAYMELSSLRSEDTAVYFCARKFLTTVVVTDYAMDYWGQGTTVTVSS

SEQ ID NO: 820 - protein, 124 aa, Artificial Sequence
  source: /note="Description of Artificial Sequence: Synthetic polypeptide"
EVQLVQSGAEVKKPGASVKVSCKASGYTFNNYGINWVRQAPGQGLEWMGWINTYTGKPTYAQGFTGRVTMTTDTSTSTAYMELSSLRSEDTAVYFCARKFLTTVVVTDYAMDYWGQGTTVTVSS

SEQ ID NO: 821 - protein, 124 aa, Artificial Sequence
  source: /note="Description of Artificial Sequence: Synthetic polypeptide"
EVQLVQSGAEVKKPGASVKVSCKASGYTFDNYGINWVRQAPGQGLEWMGWINTYTGVPTYAQGFTGRVTMTTDTSTSTAYMELSSLRSEDTAVYFCARKFLTTVVVTDYAMDYWGQGTTVTVSS

SEQ ID NO: 822 - protein, 124 aa, Artificial Sequence
  source: /note="Description of Artificial Sequence: Synthetic polypeptide"
EVQLVQSGAEVKKPGASVKVSCKASGYTFNDYGIIWVRQAPGQGLEWMGWINTYTGKPSYAQGFTGRVTMTTDTSTSTAYMELSSLRSEDTAVYFCARKFLTTVVVTDYAMDYWGQGTTVTVSS

SEQ ID NO: 823 - protein, 124 aa, Artificial Sequence
  source: /note="Description of Artificial Sequence: Synthetic polypeptide"
EVQLVQSGAEVKKPGASVKVSCKASGYTFSNYGINWVRQAPGQGLEWMGWINTYTGKPTYAQGFTGRVTMTTDTSTSTAYMELSSLRSEDTAVYFCARKFLTTVVVTDYAMDYWGQGTTVTVSS

SEQ ID NO: 824 - protein, 124 aa, Artificial Sequence
  source: /note="Description of Artificial Sequence: Synthetic polypeptide"
EVQLVQSGAEVKKPGASVKVSCKASGYTFANYGMNWVRQAPGQGLEWMGWINTYTGKPTYAQGFTGRVTMTTDTSTSTAYMELSSLRSEDTAVYFCARKFLTTVVVTDYAMDYWGQGTTVTVSS

SEQ ID NO: 825 - protein, 124 aa, Artificial Sequence
  source: /note="Description of Artificial Sequence: Synthetic polypeptide"
EVQLVQSGAEVKKPGASVKVSCKASGYTFNNYGINWVRQAPGQGLEWMGWINTYTGEPSYAQGLTGRVTMTTDTSTSTAYMELSSLRSEDTAVYFCARKFLTTVVVTDYAMDYWGQGTTVTVSS

SEQ ID NO: 826 - protein, 124 aa, Artificial Sequence
  source: /note="Description of Artificial Sequence: Synthetic polypeptide"
EVQLVQSGAEVKKPGASVKVSCKASGYTFTNYGINWVRQAPGQGLEWMGWINTYTGVPTYAQGLTGRVTMTTDTSTSTAYMELSSLRSEDTAVYFCARKFLTTVVVTDYAMDYWGQGTTVTVSS

SEQ ID NO: 827 - protein, 124 aa, Artificial Sequence
  source: /note="Description of Artificial Sequence: Synthetic polypeptide"
EVQLVQSGAEVKKPGASVKVSCKASGYTFDHYGMNWVRQAPGQGLEWMGWINTYTGKPTYAQGLTGRVTMTTDTSTSTAYMELSSLRSEDTAVYFCARKFLTTVVVTDYAMDYWGQGTTVTVSS

SEQ ID NO: 828 - protein, 124 aa, Artificial Sequence
  source: /note="Description of Artificial Sequence: Synthetic polypeptide"
EVQLVQSGAEVKKPGASVKVSCKASGYTFTNYGIGWVRQAPGQGLEWMGWINTYTGKPSYAQGLTGRVTMTTDTSTSTAYMELSSLRSEDTAVYFCARKFLTTVVVTDYAMDYWGQGTTVTVSS

SEQ ID NO: 829 - protein, 124 aa, Artificial Sequence; identical to SEQ ID NO: 779
  source: /note="Description of Artificial Sequence: Synthetic polypeptide"

SEQ ID NO: 830 - protein, 124 aa, Artificial Sequence
  source: /note="Description of Artificial Sequence: Synthetic polypeptide"
EVQLVQSGAEVKKPGASVKVSCKASGYTFNNYGMNWVRQAPGQGLEWMGWINTYTGKPTYAQGLTGRVTMTTDTSTSTAYMELSSLRSEDTAVYFCARKFLTTVVVTDYAMDYWGQGTTVTVSS

SEQ ID NO: 831 - protein, 124 aa, Artificial Sequence
  source: /note="Description of Artificial Sequence: Synthetic polypeptide"
EVQLVQSGAEVKKPGASVKVSCKASGYTFDNYGMNWVRQAPGQGLEWMGWINTYTGVPTYAQGFTGRVTMTTDTSTSTAYMELSSLRSEDTAVYFCARKFLTTVVVTDYAMDYWGQGTTVTVSS

SEQ ID NO: 832 - protein, 124 aa, Artificial Sequence
  source: /note="Description of Artificial Sequence: Synthetic polypeptide"
EVQLVQSGAEVKKPGASVKVSCKASGYTFNSYGINWVRQAPGQGLEWMGWINTYTGKPTYAQGFTGRVTMTTDTSTSTAYMELSSLRSEDTAVYFCARKFLTTVVVTDYAMDYWGQGTTVTVSS

SEQ ID NO: 833 - protein, 124 aa, Artificial Sequence
  source: /note="Description of Artificial Sequence: Synthetic polypeptide"
EVQLVQSGAEVKKPGASVKVSCKASGYTFSNYGITWVRQAPGQGLEWMGWINTYTGKPTYAQGFTGRVTMTTDTSTSTAYMELSSLRSEDTAVYFCARKFLTTVVVTDYAMDYWGQGTTVTVSS

SEQ ID NO: 834 - protein, 124 aa, Artificial Sequence
  source: /note="Description of Artificial Sequence: Synthetic polypeptide"
EVQLVQSGAEVKKPGASVKVSCKASGYTFTNYGINWVRQAPGQGLEWMGWINTYNGQPTYAQGFTGRVTMTTDTSTSTAYMELSSLRSEDTAVYFCARKFLTTVVVTDYAMDYWGQGTTVTVSS

SEQ ID NO: 835 - protein, 124 aa, Artificial Sequence
  source: /note="Description of Artificial Sequence: Synthetic polypeptide"
EVQLVQSGAEVKKPGASVKVSCKASGYTFTNYGIIWVRQAPGQGLEWMGWINTYTGEPTYAQGFTGRVTMTTDTSTSTAYMELSSLRSEDTAVYFCARKFLTTVVVTDYAMDYWGQGTTVTVSS

SEQ ID NO: 836 - protein, 124 aa, Artificial Sequence
  source: /note="Description of Artificial Sequence: Synthetic polypeptide"
EVQLVQSGAEVKKPGASVKVSCKASGYTFANYGINWVRQAPGQGLEWMGWINTYTGKPTYAQGFTGRVTMTTDTSTSTAYMELSSLRSEDTAVYFCARKFLTTVVVTDYAMDYWGQGTTVTVSS

SEQ ID NO: 837 - protein, 124 aa, Artificial Sequence
  source: /note="Description of Artificial Sequence: Synthetic polypeptide"
EVQLVQSGAEVKKPGASVKVSCKASGYTFSDYGIQWVRQAPGQGLEWMGWINTYTGRPTYAQGFTGRVTMTTDTSTSTAYMELSSLRSEDTAVYFCARKFLTTVVVTDYAMDYWGQGTTVTVSS

SEQ ID NO: 838 - protein, 124 aa, Artificial Sequence
  source: /note="Description of Artificial Sequence: Synthetic polypeptide"
EVQLVQSGAEVKKPGASVKVSCKASGYTFSNYGISWVRQAPGQGLEWMGWINTYTGKPTYAQGFTGRVTMTTDTSTSTAYMELSSLRSEDTAVYFCARKFLTTVVVTDYAMDYWGQGTTVTVSS

SEQ ID NO: 839 - protein, 124 aa, Artificial Sequence
  source: /note="Description of Artificial Sequence: Synthetic polypeptide"
EVQLVQSGAEVKKPGASVKVSCKASGYTFTNYGIQWVRQAPGQGLEWMGWINTYTGVPTYAQGFTGRVTMTTDTSTSTAYMELSSLRSEDTAVYFCARKFLTTVVVTDYAMDYWGQGTTVTVSS

SEQ ID NO: 840 - protein, 124 aa, Artificial Sequence
  source: /note="Description of Artificial Sequence: Synthetic polypeptide"
EVQLVQSGAEVKKPGASVKVSCKASGYTFTNYGINWVRQAPGQGLEWMGWINTYTGVPTYAQGFTGRVTMTTDTSTSTAYMELSSLRSEDTAVYFCARKFLTTVVVTDYAMDYWGQGTTVTVSS

SEQ ID NO: 841 - protein, 124 aa, Artificial Sequence
  source: /note="Description of Artificial Sequence: Synthetic polypeptide"
EVQLVQSGAEVKKPGASVKVSCKASGYTFTNYGINWVRQAPGQGLEWMGWINTYSGKPTYAQGFTGRVTMTTDTSTSTAYMELSSLRSEDTAVYFCARKFLTTVVVTDYAMDYWGQGTTVTVSS

SEQ ID NO: 842 - protein, 124 aa, Artificial Sequence
  source: /note="Description of Artificial Sequence: Synthetic polypeptide"
EVQLVQSGAEVKKPGASVKVSCKASGYTFSNYGINWVRQAPGQGLEWMGWINTYTGQPTYAQGFTGRVTMTTDTSTSTAYMELSSLRSEDTAVYFCARKFLTTVVVTDYAMDYWGQGTTVTVSS

SEQ ID NO: 843 - protein, 124 aa, Artificial Sequence
  source: /note="Description of Artificial Sequence: Synthetic polypeptide"
EVQLVQSGAEVKKPGASVKVSCKASGYTFPNYGINWVRQAPGQGLEWMGWINTYTGKPTYAQGFTGRVTMTTDTSTSTAYMELSSLRSEDTAVYFCARKFLTTVVVTDYAMDYWGQGTTVTVSS

SEQ ID NO: 844 - protein, 124 aa, Artificial Sequence
  source: /note="Description of Artificial Sequence: Synthetic polypeptide"
EVQLVQSGAEVKKPGASVKVSCKASGYTFTNYGINWVRQAPGQGLEWMGWINTYTGKTNYAQGFTGRVTMTTDTSTSTAYMELSSLRSEDTAVYFCARKFLTTVVVTDYAMDYWGQGTTVTVSS

SEQ ID NO: 845 - protein, 124 aa, Artificial Sequence
  source: /note="Description of Artificial Sequence: Synthetic polypeptide"
EVQLVQSGAEVKKPGASVKVSCKASGYTFNNYGINWVRQAPGQGLEWMGWINTYTGEPNYAQGFTGRVTMTTDTSTSTAYMELSSLRSEDTAVYFCARKFLTTVVVTDYAMDYWGQGTTVTVSS

SEQ ID NO: 846 - protein, 124 aa, Artificial Sequence
  source: /note="Description of Artificial Sequence: Synthetic polypeptide"
EVQLVQSGAEVKKPGASVKVSCKASGYTFSNYGITWVRQAPGQGLEWMGWINTYTGEPHYAQGLTGRVTMTTDTSTSTAYMELSSLRSEDTAVYFCARKFLTTVVVTDYAMDYWGQGTTVTVSS

SEQ ID NO: 847 - protein, 124 aa, Artificial Sequence
  source: /note="Description of Artificial Sequence: Synthetic polypeptide"
EVQLVQSGAEVKKPGASVKVSCKASGYTFKNYGINWVRQAPGQGLEWMGWINTYTGQPTYAQGFTGRVTMTTDTSTSTAYMELSSLRSEDTAVYFCARKFLTTVVVTDYAMDYWGQGTTVTVSS

SEQ ID NO: 848 - protein, 124 aa, Artificial Sequence
  source: /note="Description of Artificial Sequence: Synthetic polypeptide"
EVQLVQSGAEVKKPGASVKVSCKASGYTFNNYGINWVRQAPGQGLEWMGWINTYTGIPTYAQGFTGRVTMTTDTSTSTAYMELSSLRSEDTAVYFCARKFLTTVVVTDYAMDYWGQGTTVTVSS

SEQ ID NO: 849 - protein, 124 aa, Artificial Sequence
  source: /note="Description of Artificial Sequence: Synthetic polypeptide"
EVQLVQSGAEVKKPGASVKVSCKASGYTFTDYGINWVRQAPGQGLEWMGWINTYTGKPTYAQGFTGRVTMTTDTSTSTAYMELSSLRSEDTAVYFCARKFLTTVVVTDYAMDYWGQGTTVTVSS

SEQ ID NO: 850 - protein, 124 aa, Artificial Sequence
  source: /note="Description of Artificial Sequence: Synthetic polypeptide"
EVQLVQSGAEVKKPGASVKVSCKASGYTFSNYGINWVRQAPGQGLEWMGWINTYSGVPTYAQGFTGRVTMTTDTSTSTAYMELSSLRSEDTAVYFCARKFLTTVVVTDYAMDYWGQGTTVTVSS

SEQ ID NO: 851 - protein, 124 aa, Artificial Sequence; identical to SEQ ID NO: 849
  source: /note="Description of Artificial Sequence: Synthetic polypeptide"

SEQ ID NO: 852 - protein, 124 aa, Artificial Sequence
  source: /note="Description of Artificial Sequence: Synthetic polypeptide"
EVQLVQSGAEVKKPGASVKVSCKASGYTFTNYGMNWVRQAPGQGLEWMGWINTYTGEPTYADDFKGRFTFTLDTSTSTAYMELSSLRSEDTAVYYCARKFWRTVVGTDNAMDYWGQGTTVTVSS

SEQ ID NO: 853 - protein, 124 aa, Artificial Sequence
  source: /note="Description of Artificial Sequence: Synthetic polypeptide"
EVQLVQSGAEVKKPGASVKVSCKASGYTFTNYGMNWVRQAPGQGLEWMGWINTYTGEPTYADDFKGRFTFTLDTSTSTAYMELSSLRSEDTAVYFCARKYSTTVVVTDYAMDYWGQGTTVTVSS

SEQ ID NO: 854 - protein, 124 aa, Artificial Sequence
  source: /note="Description of Artificial Sequence: Synthetic polypeptide"
EVQLVQSGAEVKKPGASVKVSCKASGYTFTNYGMNWVRQAPGQGLEWMGWINTYTGEPTYADDFKGRFTFTLDTSTSTAYMELSSLRSEDTAVYFCARKFLTTVVVTDSAMDYWGQGTTVTVSS

SEQ ID NO: 855 - protein, 124 aa, Artificial Sequence
  source: /note="Description of Artificial Sequence: Synthetic polypeptide"
EVQLVQSGAEVKKPGASVKVSCKASGYTFTNYGMNWVRQAPGQGLEWMGWINTYTGEPTYADDFKGRFTFTLDTSTSTAYMELSSLRSEDTAVYFCARKFMTTMAVTDFAMDYWGQGTTVTVSS

SEQ ID NO: 856 - protein, 124 aa, Artificial Sequence
  source: /note="Description of Artificial Sequence: Synthetic polypeptide"
EVQLVQSGAEVKKPGASVKVSCKASGYTFTNYGMNWVRQAPGQGLEWMGWINTYTGEPTYADDFKGRFTFTLDTSTSTAYMELSSLRSEDTAVYYCARKLLTTVVATDNAMDYWGQGTTVTVSS

SEQ ID NO: 857 - protein, 124 aa, Artificial Sequence
  source: /note="Description of Artificial Sequence: Synthetic polypeptide"
EVQLVQSGAEVKKPGASVKVSCKASGYTFTNYGMNWVRQAPGQGLEWMGWINTYTGEPTYADDFKGRFTFTLDTSTSTAYMELSSLRSEDTAVYYCARKFLTTVIVTDNAMDYWGQGTTVTVSS

SEQ ID NO: 858 - protein, 124 aa, Artificial Sequence
  source: /note="Description of Artificial Sequence: Synthetic polypeptide"
EVQLVQSGAEVKKPGASVKVSCKASGYTFTNYGMNWVRQAPGQGLEWMGWINTYTGEPTYADDFKGRFTFTLDTSTSTAYMELSSLRSEDTAVYFCARKFFTPVVVTDNAMDYWGQGTTVTVSS

SEQ ID NO: 859 - protein, 124 aa, Artificial Sequence
  source: /note="Description of Artificial Sequence: Synthetic polypeptide"
EVQLVQSGAEVKKPGASVKVSCKASGYTFTNYGMNWVRQAPGQGLEWMGWINTYTGEPTYADDFKGRFTFTLDTSTSTAYMELSSLRSEDTAVYYCARKLMTTVVVTDHAMDYWGQGTTVTVSS

SEQ ID NO: 860 - protein, 124 aa, Artificial Sequence
  source: /note="Description of Artificial Sequence: Synthetic polypeptide"
EVQLVQSGAEVKKPGASVKVSCKASGYTFTNYGMNWVRQAPGQGLEWMGWINTYTGEPTYADDFKGRFTFTLDTSTSTAYMELSSLRSEDTAVYYCARKYLTTVVVTDSAMDYWGQGTTVTVSS

SEQ ID NO: 861 - protein, 124 aa, Artificial Sequence
  source: /note="Description of Artificial Sequence: Synthetic polypeptide"
EVQLVQSGAEVKKPGASVKVSCKASGYTFTNYGMNWVRQAPGQGLEWMGWINTYTGEPTYADDFKGRFTFTLDTSTSTAYMELSSLRSEDTAVYYCARKFRSSVAVTDNAMDYWGQGTTVTVSS

SEQ ID NO: 862 - protein, 124 aa, Artificial Sequence
  source: /note="Description of Artificial Sequence: Synthetic polypeptide"
EVQLVQSGAEVKKPGASVKVSCKASGYTFTNYGMNWVRQAPGQGLEWMGWINTYTGEPTYADDFKGRFTFTLDTSTSTAYMELSSLRSEDTAVYYCARKLFTTVVVTDSAMDYWGQGTTVTVSS

SEQ ID NO: 863 - protein, 124 aa, Artificial Sequence
  source: /note="Description of Artificial Sequence: Synthetic polypeptide"
EVQLVQSGAEVKKPGASVKVSCKASGYTFTNYGMNWVRQAPGQGLEWMGWINTYTGEPTYADDFKGRFTFTLDTSTSTAYMELSSLRSEDTAVYFCARKYLMPVVVTDYAMDYWGQGTTVTVSS

SEQ ID NO: 864 - protein, 124 aa, Artificial Sequence
  source: /note="Description of Artificial Sequence: Synthetic polypeptide"
EVQLVQSGAEVKKPGASVKVSCKASGYTFTNYGMNWVRQAPGQGLEWMGWINTYTGEPTYADDFKGRFTFTLDTSTSTAYMELSSLRSEDTAVYFCARKLLDAVMVTDYAMDYWGQGTTVTVSS

SEQ ID NO: 865 - protein, 124 aa, Artificial Sequence
  source: /note="Description of Artificial Sequence: Synthetic polypeptide"
EVQLVQSGAEVKKPGASVKVSCKASGYTFTNYGMNWVRQAPGQGLEWMGWINTYTGEPTYADDFKGRFTFTLDTSTSTAYMELSSLRSEDTAVYYCARKFLTTVVVNDYAMDYWGQGTTVTVSS

SEQ ID NO: 866 - protein, 124 aa, Artificial Sequence
  source: /note="Description of Artificial Sequence: Synthetic polypeptide"
EVQLVQSGAEVKKPGASVKVSCKASGYTFTNYGMNWVRQAPGQGLEWMGWINTYTGEPTYADDFKGRFTFTLDTSTSTAYMELSSLRSEDTAVYYCARKLLTTVAVTDYAMDYWGQGTTVTVSS

SEQ ID NO: 867 - protein, 124 aa, Artificial Sequence
  source: /note="Description of Artificial Sequence: Synthetic polypeptide"
EVQLVQSGAEVKKPGASVKVSCKASGYTFTNYGMNWVRQAPGQGLEWMGWINTYTGEPTYADDFKGRFTFTLDTSTSTAYMELSSLRSEDTAVYFCARKFLKTVVATDDAMDYWGQGTTVTVSS

SEQ ID NO: 868 - protein, 124 aa, Artificial Sequence
  source: /note="Description of Artificial Sequence: Synthetic polypeptide"
EVQLVQSGAEVKKPGASVKVSCKASGYTFTNYGMNWVRQAPGQGLEWMGWINTYTGEPTYADDFKGRFTFTLDTSTSTAYMELSSLRSEDTAVYYCARKFLNTAVVTDYAMDYWGQGTTVTVSS

SEQ ID NO: 869 - protein, 124 aa, Artificial Sequence
  source: /note="Description of Artificial Sequence: Synthetic polypeptide"
EVQLVQSGAEVKKPGASVKVSCKASGYTFTNYGMNWVRQAPGQGLEWMGWINTYTGEPTYADDFKGRFTFTLDTSTSTAYMELSSLRSEDTAVYYCARRFLTTVDVTDNAMDYWGQGTTVTVSS

SEQ ID NO: 870 - protein, 124 aa, Artificial Sequence
  source: /note="Description of Artificial Sequence: Synthetic polypeptide"
EVQLVQSGAEVKKPGASVKVSCKASGYTFTNYGMNWVRQAPGQGLEWMGWINTYTGEPTYADDFKGRFTFTLDTSTSTAYMELSSLRSEDTAVYFCARKYLTPVVATDFAMDYWGQGTTVTVSS

SEQ ID NO: 871 - protein, 124 aa, Artificial Sequence
  source: /note="Description of Artificial Sequence: Synthetic polypeptide"
EVQLVQSGAEVKKPGASVKVSCKASGYTFTNYGMNWVRQAPGQGLEWMGWINTYTGEPTYADDFKGRFTFTLDTSTSTAYMELSSLRSEDTAVYFCARKCMTTIVETDNAMDYWGQGTTVTVSS

SEQ ID NO: 872 - protein, 124 aa, Artificial Sequence
  source: /note="Description of Artificial Sequence: Synthetic polypeptide"
EVQLVQSGAEVKKPGASVKVSCKASGYTFTNYGMNWVRQAPGQGLEWMGWINTYTGEPTYADDFKGRFTFTLDTSTSTAYMELSSLRSEDTAVYYCARKFMNTVDVTDNAMDYWGQGTTVTVSS

SEQ ID NO: 873 - protein, 124 aa, Artificial Sequence
  source: /note="Description of Artificial Sequence: Synthetic polypeptide"
EVQLVQSGAEVKKPGASVKVSCKASGYTFTNYGMNWVRQAPGQGLEWMGWINTYTGEPTYADDFKGRFTFTLDTSTSTAYMELSSLRSEDTAVYYCARKLFTTVVVTDDAMDYWGQGTTVTVSS

SEQ ID NO: 874 - protein, 124 aa, Artificial Sequence
  source: /note="Description of Artificial Sequence: Synthetic polypeptide"
EVQLVQSGAEVKKPGASVKVSCKASGYTFTNYGMNWVRQAPGQGLEWMGWINTYTGEPTYADDFKGRFTFTLDTSTSTAYMELSSLRSEDTAVYYCARKLMTTVVVTDYAMDYWGQGTTVTVSS

SEQ ID NO: 875 - protein, 124 aa, Artificial Sequence
  source: /note="Description of Artificial Sequence: Synthetic polypeptide"
EVQLVQSGAEVKKPGASVKVSCKASGYTFTNYGMNWVRQAPGQGLEWMGWINTYTGEPTYADDFKGRFTFTLDTSTSTAYMELSSLRSEDTAVYYCARKFLPTVVVTDYAMDYWGQGTTVTVSS

SEQ ID NO: 876 - protein, 124 aa, Artificial Sequence
  source: /note="Description of Artificial Sequence: Synthetic polypeptide"
EVQLVQSGAEVKKPGASVKVSCKASGYTFTNYGMNWVRQAPGQGLEWMGWINTYTGEPTYADDFKGRFTFTLDTSTSTAYMELSSLRSEDTAVYFCARKLLTTVVVTDNAMDYWGQGTTVTVSS

SEQ ID NO: 877 - protein, 124 aa, Artificial Sequence
  source: /note="Description of Artificial Sequence: Synthetic polypeptide"
EVQLVQSGAEVKKPGASVKVSCKASGYTFTNYGMNWVRQAPGQGLEWMGWINTYTGEPTYADDFKGRFTFTLDTSTSTAYMELSSLRSEDTAVYYCARKILTTVVVTDNAMDYWGQGTTVTVSS

SEQ ID NO: 878 - protein, 124 aa, Artificial Sequence
  source: /note="Description of Artificial Sequence: Synthetic polypeptide"
EVQLVQSGAEVKKPGASVKVSCKASGYTFTNYGMNWVRQAPGQGLEWMGWINTYTGEPTYADDFKGRFTFTLDTSTSTAYMELSSLRSEDTAVYYCARKVMATEVVTDYAMDYWGQGTTVTVSS

SEQ ID NO: 879 - protein, 124 aa, Artificial Sequence
  source: /note="Description of Artificial Sequence: Synthetic polypeptide"
EVQLVQSGAEVKKPGASVKVSCKASGYTFTNYGMNWVRQAPGQGLEWMGWINTYTGEPTYADDFKGRFTFTLDTSTSTAYMELSSLRSEDTAVYYCARKLVTTVVVTDYAMDYWGQGTTVTVSS

SEQ ID NO: 880 - protein, 124 aa, Artificial Sequence
  source: /note="Description of Artificial Sequence: Synthetic polypeptide"
EVQLVQSGAEVKKPGASVKVSCKASGYTFTNYGMNWVRQAPGQGLEWMGWINTYTGEPTYADDFKGRFTFTLDTSTSTAYMELSSLRSEDTAVYFCARKFRKPVSVTDYAMDYWGQGTTVTVSS

SEQ ID NO: 881 - protein, 124 aa, Artificial Sequence
  source: /note="Description of Artificial Sequence: Synthetic polypeptide"
EVQLVQSGAEVKKPGASVKVSCKASGYTFTNYGMNWVRQAPGQGLEWMGWINTYTGEPTYADDFKGRFTFTLDTSTSTAYMELSSLRSEDTAVYYCARKLWTTVVVTDNAMDYWGQGTTVTVSS

SEQ ID NO: 882 - protein, 124 aa, Artificial Sequence
  source: /note="Description of Artificial Sequence: Synthetic polypeptide"
EVQLVQSGAEVKKPGASVKVSCKASGYTFTNYGMNWVRQAPGQGLEWMGWINTYTGEPTYADDFKGRFTFTLDTSTSTAYMELSSLRSEDTAVYYCARKLLTPVVVTDYAMDYWGQGTTVTVSS

SEQ ID NO: 883 - protein, 124 aa, Artificial Sequence
  source: /note="Description of Artificial Sequence: Synthetic polypeptide"
EVQLVQSGAEVKKPGASVKVSCKASGYTFTNYGMNWVRQAPGQGLEWMGWINTYTGEPTYADDFKGRFTFTLDTSTSTAYMELSSLRSEDTAVYYCARKFRTTVVETDYCMDYWGQGTTVTVSS

SEQ ID NO: 884 - protein, 124 aa, Artificial Sequence
  source: /note="Description of Artificial Sequence: Synthetic polypeptide"
EVQLVQSGAEVKKPGASVKVSCKASGYTFTNYGMNWVRQAPGQGLEWMGWINTYTGEPTYADDFKGRFTFTLDTSTSTAYMELSSLRSEDTAVYFCARKYFTTVAVTDYAMDYWGQGTTVTVSS

SEQ ID NO: 885 - protein, 124 aa, Artificial Sequence
  source: /note="Description of Artificial Sequence: Synthetic polypeptide"
EVQLVQSGAEVKKPGASVKVSCKASGYTFTNYGMNWVRQAPGQGLEWMGWINTYTGEPTYADDFKGRFTFTLDTSTSTAYMELSSLRSEDTAVYYCARRFLTTVEVTDLAMDYWGQGTTVTVSS

SEQ ID NO: 886 - protein, 124 aa, Artificial Sequence
  source: /note="Description of Artificial Sequence: Synthetic polypeptide"
EVQLVQSGAEVKKPGASVKVSCKASGYTFTNYGMNWVRQAPGQGLEWMGWINTYTGEPTYADDFKGRFTFTLDTSTSTAYMELSSLRSEDTAVYYCARKFLRTEVMTDYAMDYWGQGTTVTVSS

SEQ ID NO: 887 - protein, 124 aa, Artificial Sequence
  source: /note="Description of Artificial Sequence: Synthetic polypeptide"
EVQLVQSGAEVKKPGASVKVSCKASGYTFTNYGMNWVRQAPGQGLEWMGWINTYTGEPTYADDFKGRFTFTLDTSTSTAYMELSSLRSEDTAVYFCARKFLSTVAVTDSAMDYWGQGTTVTVSS

SEQ ID NO: 888 - protein, 124 aa, Artificial Sequence
  source: /note="Description of Artificial Sequence: Synthetic polypeptide"
EVQLVQSGAEVKKPGASVKVSCKASGYTFTNYGMNWVRQAPGQGLEWMGWINTYTGEPTYADDFKGRFTFTLDTSTSTAYMELSSLRSEDTAVYYCARKVLNTVVVTDYAMDYWGQGTTVTVSS

SEQ ID NO: 889 - protein, 124 aa, Artificial Sequence
  source: /note="Description of Artificial Sequence: Synthetic polypeptide"
EVQLVQSGAEVKKPGASVKVSCKASGYTFTNYGMNWVRQAPGQGLEWMGWINTYTGEPTYADDFKGRFTFTLDTSTSTAYMELSSLRSEDTAVYFCARKFMNTAMVTDYAMDYWGQGTTVTVSS

SEQ ID NO: 890 - protein, 124 aa, Artificial Sequence
  source: /note="Description of Artificial Sequence: Synthetic polypeptide"
EVQLVQSGAEVKKPGASVKVSCKASGYTFTNYGMNWVRQAPGQGLEWMGWINTYTGEPTYADDFKGRFTFTLDTSTSTAYMELSSLRSEDTAVYYCARKFSTTVVVTDYAMDYWGQGTTVTVSS

SEQ ID NO: 891 - protein, 124 aa, Artificial Sequence
  source: /note="Description of Artificial Sequence: Synthetic polypeptide"
EVQLVQSGAEVKKPGASVKVSCKASGYTFTNYGMNWVRQAPGQGLEWMGWINTYTGEPTYADDFKGRFTFTLDTSTSTAYMELSSLRSEDTAVYFCARKYFTTVVVTDYAMDYWGQGTTVTVSS

SEQ ID NO: 892 - protein, 124 aa, Artificial Sequence
  source: /note="Description of Artificial Sequence: Synthetic polypeptide"
EVQLVQSGAEVKKPGASVKVSCKASGYTFTNYGMNWVRQAPGQGLEWMGWINTYTGEPTYADDFKGRFTFTLDTSTSTAYMELSSLRSEDTAVYFCARKFLNTVVVTDYAMDYWGQGTTVTVSS

SEQ ID NO: 893 - protein, 124 aa, Artificial Sequence
  source: /note="Description of Artificial Sequence: Synthetic polypeptide"
EVQLVQSGAEVKKPGASVKVSCKASGYTFTNYGMNWVRQAPGQGLEWMGWINTYTGEPTYADDFKGRFTFTLDTSTSTAYMELSSLRSEDTAVYYCARKFMPTVVETDYAMDYWGQGTTVTVSS

SEQ ID NO: 894 - protein, 124 aa, Artificial Sequence
  source: /note="Description of Artificial Sequence: Synthetic polypeptide"
EVQLVQSGAEVKKPGASVKVSCKASGYTFTNYGINWVRQAPGQGLEWMGWINTYTGNPTYAQGFTGRVTMTTDTSTSTAYMELSSLRSEDTAVYFCARKFLTTVVVTDYAMDYWGQGTTVTVSS

SEQ ID NO: 895 - protein, 124 aa, Artificial Sequence
  source: /note="Description of Artificial Sequence: Synthetic polypeptide"
EVQLVQSGAEVKKPGASVKVSCKASGYTFADYGMNWVRQAPGQGLEWMGWINTYTGEPTYAQGFTGRVTMTTDTSTSTAYMELSSLRSEDTAVYFCARKFLTTVVVTDYAMDYWGQGTTVTVSS

SEQ ID NO: 896 - protein, 124 aa, Artificial Sequence
  source: /note="Description of Artificial Sequence: Synthetic polypeptide"
EVQLVQSGAEVKKPGASVKVSCKASGYTFTNYGMNWVRQAPGQGLEWMGWINTYTGEPTYADDFKGRFTFTLDTSTSTAYMELSSLRSEDTAVYYCARKFLTTVVVTDCAMDYWGQGTTVTVSS

SEQ ID NO: 897 - protein, 124 aa, Artificial Sequence
  source: /note="Description of Artificial Sequence: Synthetic polypeptide"
EVQLVQSGAEVKKPGASVKVSCKASGYTFTNYGMNWVRQAPGQGLEWMGWINTYTGEPTYAQGFTGRVTMTTDTSTSTAYMELSSLRSEDTAVYFCARKFLTTVVVTDYAMDYWGQGTTVTVSS

SEQ ID NO: 898 - protein, 124 aa, Artificial Sequence
  source: /note="Description of Artificial Sequence: Synthetic polypeptide"
EVQLVQSGAEVKKPGASVKVSCKASGYTFTNYGMNWVRQAPGQGLEWMGWINTYTGEPTYADDFKGRFTFTLDTSTSTAYMELSSLRSEDTAVYYCARKFLTTVVVTDNAMDYWGQGTTVTVSS

SEQ ID NO: 899 - protein, 124 aa, Artificial Sequence
  source: /note="Description of Artificial Sequence: Synthetic polypeptide"
EVQLVQSGAEVKKPGASVKVSCKASGYTFTNYGMNWVRQAPGQGLEWMGWINTYTGEPTYADDFKGRFTFTLDTSTSTAYMELSSLRSEDTAVYYCARKLLNTVVGTDYAMDYWGQGTTVTVSS

SEQ ID NO: 900 - protein, 124 aa, Artificial Sequence
  source: /note="Description of Artificial Sequence: Synthetic polypeptide"
EVQLVQSGAEVKKPGASVKVSCKASGYTFTNYGMNWVRQAPGQGLEWMGWINTYTGEPTYADDFKGRFTFTLDTSTSTAYMELSSLRSEDTAVYFCARKLLTTEAVTDYAMDYWGQGTTVTVSS

SEQ ID NO: 901 - protein, 124 aa, Artificial Sequence
  source: /note="Description of Artificial Sequence: Synthetic polypeptide"
EVQLVQSGAEVKKPGASVKVSCKASGYTFTNYGMNWVRQAPGQGLEWMGWINTYTGEPTYADDFKGRFTFTLDTSTSTAYMELSSLRSEDTAVYFCARKYSTPVVVTDYAMDYWGQGTTVTVSS

SEQ ID NO: 902 - protein, 124 aa, Artificial Sequence
  source: /note="Description of Artificial Sequence: Synthetic polypeptide"
EVQLVQSGAEVKKPGASVKVSCKASGYTFTNYGINWVRQAPGQGLEWMGWINTYTGEPTYAQGLTGRVTMTTDTSTSTAYMELSSLRSEDTAVYFCARKFLTTVVVTDYAMDYWGQGTTVTVSS

SEQ ID NO: 903 - protein, 124 aa, Artificial Sequence
  source: /note="Description of Artificial Sequence: Synthetic polypeptide"
EVQLVQSGAEVKKPGASVKVSCKASGYTFTNYGMNWVRQAPGQGLEWMGWINTYTGEPTYADDFKGRFTFTLDTSTSTAYMELSSLRSEDTAVYFCARKCLNTVAVTEHRMDYWGQGTTVTVSS

SEQ ID NO: 904 - protein, 124 aa, Artificial Sequence
  source: /note="Description of Artificial Sequence: Synthetic polypeptide"
EVQLVQSGAEVKKPGASVKVSCKASGYTFTNYGMNWVRQAPGQGLEWMGWINTYTGEPTYADDFKGRFTFTLDTSTSTAYMELSSLRSEDTAVYYCARKFLTTVVHTDYAMDYWGQGTTVTVSS

SEQ ID NO: 905 - protein, 124 aa, Artificial Sequence
  source: /note="Description of Artificial Sequence: Synthetic polypeptide"
EVQLVQSGAEVKKPGASVKVSCKASGYTFTNYGMNWVRQAPGQGLEWMGWINTYTGQPTYAQGFTGRVTMTTDTSTSTAYMELSSLRSEDTAVYFCARKFLTTVVVTDYAMDYWGQGTTVTVSS

SEQ ID NO: 906 - protein, 124 aa, Artificial Sequence
  source: /note="Description of Artificial Sequence: Synthetic polypeptide"
EVQLVQSGAEVKKPGASVKVSCKASGYTFTNYGINWVRQAPGQGLEWMGWINTYTGKPTYAQGFTGRVTMTTDTSTSTAYMELSSLRSEDTAVYFCARKFLTTVVVTDYAMDYWGQGTTVTVSS

SEQ ID NO: 907 - protein, 124 aa, Artificial Sequence
  source: /note="Description of Artificial Sequence: Synthetic polypeptide"
EVQLVQSGAEVKKPGASVKVSCKASGYTFANYGINWVRQAPGQGLEWMGWINTYTGEPTYAQGFTGRVTMTTDTSTSTAYMELSSLRSEDTAVYFCARKFLTTVVVTDYAMDYWGQGTTVTVSS

SEQ ID NO: 908 - protein, 124 aa, Artificial Sequence
  source: /note="Description of Artificial Sequence: Synthetic polypeptide"
EVQLVQSGAEVKKPGASVKVSCKASGYTFTNYGMNWVRQAPGQGLEWMGWINTYTGEPTYADDFKGRFTFTLDTSTSTAYMELSSLRSEDTAVYYCARKFRTTVVLTDSAMDYWGQGTTVTVSS

SEQ ID NO: 909 - protein, 124 aa, Artificial Sequence
  source: /note="Description of Artificial Sequence: Synthetic polypeptide"
EVQLVQSGAEVKKPGASVKVSCKASGYTFSNYGINWVRQAPGQGLEWMGWINTYTGEPTYAQGLTGRVTMTTDTSTSTAYMELSSLRSEDTAVYFCARKFLTTVVVTDYAMDYWGQGTTVTVSS

SEQ ID NO: 910 - protein, 124 aa, Artificial Sequence
  source: /note="Description of Artificial Sequence: Synthetic polypeptide"
EVQLVQSGAEVKKPGASVKVSCKASGYTFTNYGMNWVRQAPGQGLEWMGWINTYTGEPTYADDFKGRFTFTLDTSTSTAYMELSSLRSEDTAVYYCARKFQTPVVDTDYAMDYWGQGTTVTVSS

SEQ ID NO: 911 - protein, 124 aa, Artificial Sequence
  source: /note="Description of Artificial Sequence: Synthetic polypeptide"
EVQLVQSGAEVKKPGASVKVSCKASGYTFTNYGMNWVRQAPGQGLEWMGWINTYTGEPTYADDFKGRFTFTLDTSTSTAYMELSSLRSEDTAVYYCARKFMKTRVVTDNAMDYWGQGTTVTVSS

SEQ ID NO: 912 - protein, 124 aa, Artificial Sequence
  source: /note="Description of Artificial Sequence: Synthetic polypeptide"
EVQLVQSGAEVKKPGASVKVSCKASGYTFSNYGIVWVRQAPGQGLEWMGWINTYTGEPTYAQGFTGRVTMTTDTSTSTAYMELSSLRSEDTAVYFCARKFLTTVVVTDYAMDYWGQGTTVTVSS

SEQ ID NO: 913 - protein, 124 aa, Artificial Sequence
  source: /note="Description of Artificial Sequence: Synthetic polypeptide"
EVQLVQSGAEVKKPGASVKVSCKASGYTFPNYGISWVRQAPGQGLEWMGWINTYTGEPSYAQGFTGRVTMTTDTSTSTAYMELSSLRSEDTAVYFCARKFLTTVVVTDYAMDYWGQGTTVTVSS

SEQ ID NO: 914 - protein, 124 aa, Artificial Sequence
  source: /note="Description of Artificial Sequence: Synthetic polypeptide"
EVQLVQSGAEVKKPGASVKVSCKASGYTFTNYGINWVRQAPGQGLEWMGWINTYTGEPSYAQGLTGRVTMTTDTSTSTAYMELSSLRSEDTAVYFCARKFLTTVVVTDYAMDYWGQGTTVTVSS

SEQ ID NO: 915 - protein, 124 aa, Artificial Sequence
  source: /note="Description of Artificial Sequence: Synthetic polypeptide"
EVQLVQSGAEVKKPGASVKVSCKASGYTFTKYGINWVRQAPGQGLEWMGWINTYTGEPTYAQGFTGRVTMTTDTSTSTAYMELSSLRSEDTAVYFCARKFLTTVVVTDYAMDYWGQGTTVTVSS

SEQ ID NO: 916 - protein, 124 aa, Artificial Sequence
  source: /note="Description of Artificial Sequence: Synthetic polypeptide"
EVQLVQSGAEVKKPGASVKVSCKASGYTFTNYGMNWVRQAPGQGLEWMGWINTYTGEPTYADDFKGRFTFTLDTSTSTAYMELSSLRSEDTAVYYCARKYLTTVVATDYAMDYWGQGTTVTVSS

SEQ ID NO: 917 - protein, 124 aa, Artificial Sequence
  source: /note="Description of Artificial Sequence: Synthetic polypeptide"
EVQLVQSGAEVKKPGASVKVSCKASGYTFTNYGMNWVRQAPGQGLEWMGWINTYTGEPTYADDFKGRFTFTLDTSTSTAYMELSSLRSEDTAVYYCARKLLNTVVVTDYAMDYWGQGTTVTVSS

SEQ ID NO: 918 - protein, 124 aa, Artificial Sequence
  source: /note="Description of Artificial Sequence: Synthetic polypeptide"
EVQLVQSGAEVKKPGASVKVSCKASGYTFTNYGMNWVRQAPGQGLEWMGWINTYTGEPTYADDFKGRFTFTLDTSTSTAYMELSSLRSEDTAVYYCARKFLTPVVVTDCAMDYWGQGTTVTVSS

SEQ ID NO: 919 - protein, 124 aa, Artificial Sequence
  source: /note="Description of Artificial Sequence: Synthetic polypeptide"
EVQLVQSGAEVKKPGASVKVSCKASGYTFTNYGINWVRQAPGQGLEWMGWINTYTGEPRYAQGLTGRVTMTTDTSTSTAYMELSSLRSEDTAVYFCARKFLTTVVVTDYAMDYWGQGTTVTVSS

SEQ ID NO: 920 - protein, 124 aa, Artificial Sequence
  source: /note="Description of Artificial Sequence: Synthetic polypeptide"
EVQLVQSGAEVKKPGASVKVSCKASGYTFRDYGINWVRQAPGQGLEWMGWINTYTGLPTYAQGFTGRVTMTTDTSTSTAYMELSSLRSEDTAVYFCARKFLTTVVVTDYAMDYWGQGTTVTVSS

SEQ ID NO: 921 - protein, 124 aa, Artificial Sequence
  source: /note="Description of Artificial Sequence: Synthetic polypeptide"
EVQLVQSGAEVKKPGASVKVSCKASGYTFTNYGMNWVRQAPGQGLEWMGWINTYTGEPTYADDFKGRFTFTLDTSTSTAYMELSSLRSEDTAVYFCARKFWTTIVVTDYAMDYWGQGTTVTVSS

SEQ ID NO: 922 - protein, 124 aa, Artificial Sequence
  source: /note="Description of Artificial Sequence: Synthetic polypeptide"
EVQLVQSGAEVKKPGASVKVSCKASGYTFTNYGMNWVRQAPGQGLEWMGWINTYTGEPTYADDFKGRFTFTLDTSTSTAYMELSSLRSEDTAVYFCARKLLTTVSATDNAMDYWGQGTTVTVSS

SEQ ID NO: 923 - protein, 124 aa, Artificial Sequence
  source: /note="Description of Artificial Sequence: Synthetic polypeptide"
EVQLVQSGAEVKKPGASVKVSCKASGYTFTNYGMNWVRQAPGQGLEWMGWINTYTGEPTYADDFKGRFTFTLDTSTSTAYMELSSLRSEDTAVYYCARKFLNTVVVTDYAMDYWGQGTTVTVSS

SEQ ID NO: 924 - protein, 124 aa, Artificial Sequence
  source: /note="Description of Artificial Sequence: Synthetic polypeptide"
EVQLVQSGAEVKKPGASVKVSCKASGYTFTDYGINWVRQAPGQGLEWMGWINTYNGEPSYAQGLTGRVTMTTDTSTSTAYMELSSLRSEDTAVYFCARKFLTTVVVTDYAMDYWGQGTTVTVSS

SEQ ID NO: 925 - protein, 124 aa, Artificial Sequence
  source: /note="Description of Artificial Sequence: Synthetic polypeptide"
EVQLVQSGAEVKKPGASVKVSCKASGYTFATYGIAWVRQAPGQGLEWMGWINTYSGVPKYAQGLTGRVTMTTDTSTSTAYMELSSLRSEDTAVYFCARKFLTTVVVTDYAMDYWGQGTTVTVSS

SEQ ID NO: 926 - protein, 124 aa, Artificial Sequence
  source: /note="Description of Artificial Sequence: Synthetic polypeptide"
EVQLVQSGAEVKKPGASVKVSCKASGYTFTNYGMNWVRQAPGQGLEWMGWINTYTGEPTYADDFKGRFTFTLDTSTSTAYMELSSLRSEDTAVYFCARKFRTTAVPTDNAMDYWGQGTTVTVSS

SEQ ID NO: 927 - protein, 124 aa, Artificial Sequence
  source: /note="Description of Artificial Sequence: Synthetic polypeptide"
EVQLVQSGAEVKKPGASVKVSCKASGYTFTNYGMNWVRQAPGQGLEWMGWINTYTGEPTYADDFKGRFTFTLDTSTSTAYMELSSLRSEDTAVYYCARKFLTTVVNTDSAMDYWGQGTTVTVSS

SEQ ID NO: 928 - protein, 124 aa, Artificial Sequence
  source: /note="Description of Artificial Sequence: Synthetic polypeptide"
EVQLVQSGAEVKKPGASVKVSCKASGYTFTNYGMNWVRQAPGQGLEWMGWINTYTGEPTYADDFKGRFTFTLDTSTSTAYMELSSLRSEDTAVYFCARKFLTTVVVTDYAMDYWGRGTTVTVSS

SEQ ID NO: 929 - protein, 124 aa, Artificial Sequence
  source: /note="Description of Artificial Sequence: Synthetic polypeptide"
EVQLVQSGAEVKKPGASVKVSCKASGYTFTNYGMNWVRQAPGQGLEWMGWINTYTGEPTYADDFKGRFTFTLDTSTSTAYMELSSLRSEDTAVYYCARKLLKTRVVTDYAMDYWGQGTTVTVSS

SEQ ID NO: 930 - protein, 124 aa, Artificial Sequence; identical to SEQ ID NO: 779
  source: /note="Description of Artificial Sequence: Synthetic polypeptide"

SEQ ID NO: 931 - protein, 124 aa, Artificial Sequence
  source: /note="Description of Artificial Sequence: Synthetic polypeptide"
EVQLVQSGAEVKKPGASVKVSCKASGYTFTNYGMNWVRQAPGQGLEWMGWINTYTGEPTYADDFKGRFTFTLDTSTSTAYMELSSLRSEDTAVYYCARKLLTTVVATDYAMDYWGQGTTVTVSS

SEQ ID NO: 932 - protein, 124 aa, Artificial Sequence
  source: /note="Description of Artificial Sequence: Synthetic polypeptide"
EVQLVQSGAEVKKPGASVKVSCKASGYTFTNYGINWVRQAPGQGLEWMGWINTYTGEPTYAQGFTGRVTMTTDTSTSTAYMELSSLRSEDTAVYFCARKFLTTVVVTDYAMDYWGQGTTVTVSS

SEQ ID NO: 933 - protein, 124 aa, Artificial Sequence; identical to SEQ ID NO: 810
  source: /note="Description of Artificial Sequence: Synthetic polypeptide"

SEQ ID NO: 934 - protein, 124 aa, Artificial Sequence
  source: /note="Description of Artificial Sequence: Synthetic polypeptide"
EVQLVQSGAEVKKPGASVKVSCKASGYTFTNYGMNWVRQAPGQGLEWMGWINTYTGEPTYADDFKGRFTFTLDTSTSTAYMELSSLRSEDTAVYYCARKFFPTMVVTDYAMDYWGQGTTVTVSS

SEQ ID NO: 935 - protein, 124 aa, Artificial Sequence
  source: /note="Description of Artificial Sequence: Synthetic polypeptide"
EVQLVQSGAEVKKPGASVKVSCKASGYTFTNYGMNWVRQAPGQGLEWMGWINTYTGEPTYADDFKGRFTFTLDTSTSTAYMELSSLRSEDTAVYYCARKFVTTMVVTDYAMDYWGQGTTVTVSS

SEQ ID NO: 936 - protein, 124 aa, Artificial Sequence
  source: /note="Description of Artificial Sequence: Synthetic polypeptide"
EVQLVQSGAEVKKPGASVKVSCKASGYTFTNYGMNWVRQAPGQGLEWMGWINTYTGEPTYAQGLTGRVTMTTDTSTSTAYMELSSLRSEDTAVYFCARKFLTTVVVTDYAMDYWGQGTTVTVSS

SEQ ID NO: 937 - protein, 124 aa, Artificial Sequence
  source: /note="Description of Artificial Sequence: Synthetic polypeptide"
EVQLVQSGAEVKKPGASVKVSCKASGYTFTNYGMNWVRQAPGQGLEWMGWINTYTGEPTYADDFKGRFTFTLDTSTSTAYMELSSLRSEDTAVYFCARKLLTTIVATDNAMDYWGQGTTVTVSS

SEQ ID NO: 938 - protein, 124 aa, Artificial Sequence
  source: /note="Description of Artificial Sequence: Synthetic polypeptide"
EVQLVQSGAEVKKPGASVKVSCKASGYTFTNYGMNWVRQAPGQGLEWMGWINTYTGEPTYADDFKGRFTFTLDTSTSTAYMELSSLRSEDTAVYYCARKLMSTVVETDNAMDYWGQGTTVTVSS

SEQ ID NO: 939 - protein, 124 aa, Artificial Sequence
  source: /note="Description of Artificial Sequence: Synthetic polypeptide"
EVQLVQSGAEVKKPGASVKVSCKASGYTFTNYGMNWVRQAPGQGLEWMGWINTYTGEPTYADDFKGRFTFTLDTSTSTAYMELSSLRSEDTAVYYCARKLLFTVVQTDYAMDYWGQGTTVTVSS

SEQ ID NO: 940 - protein, 124 aa, Artificial Sequence
  source: /note="Description of Artificial Sequence: Synthetic polypeptide"
EVQLVQSGAEVKKPGASVKVSCKASGYTFTNYGMNWVRQAPGQGLEWMGWINTYTGEPTYADDFKGRFTFTLDTSTSTAYMELSSLRSEDTAVYYCARKLLNTVVDTDYAMDYWGQGTTVTVSS

SEQ ID NO: 941 - protein, 124 aa, Artificial Sequence
  source: /note="Description of Artificial Sequence: Synthetic polypeptide"
EVQLVQSGAEVKKPGASVKVSCKASGYTFSNYGIIWVRQAPGQGLEWMGWINTYTGEPHYAQKLQGRVTMTTDTSTSTAYMELSSLRSEDTAVYFCARKLFTVEDVTDCAMDYWGQGTTVTVSS

SEQ ID NO: 942 - protein, 124 aa, Artificial Sequence
  source: /note="Description of Artificial Sequence: Synthetic polypeptide"
EVQLVQSGAEVKKPGASVKVSCKASGYTFDNYGMNWVRQAPGQGLEWMGWINTYNGKPTYAQKFQGRVTMTTDTSTSTAYMELSSLRSEDTAVYFCARKLFLVEAVTDYAMDYWGQGTTVTVSS

SEQ ID NO: 943 - protein, 124 aa, Artificial Sequence; identical to SEQ ID NO: 78
  source: /note="Description of Artificial Sequence: Synthetic polypeptide"

SEQ ID NO: 944 - protein, 124 aa, Artificial Sequence; identical to SEQ ID NO: 76
  source: /note="Description of Artificial Sequence: Synthetic polypeptide"

SEQ ID NO: 945 - protein, 124 aa, Artificial Sequence
  source: /note="Description of Artificial Sequence: Synthetic polypeptide"
EVQLVQSGAEVKKPGASVKVSCKASGYTFNNYGIIWVRQAPGQGLEWMGWINTYTGEPHYAQKFQGRVTMTTDTSTSTAYMELSSLRSEDTAVYYCARKLFKTMAVTDAAMDYWGQGTTVTVSS

SEQ ID NO: 946 - protein, 124 aa, Artificial Sequence; identical to SEQ ID NO: 79
  source: /note="Description of Artificial Sequence: Synthetic polypeptide"

SEQ ID NO: 947 - protein, 124 aa, Artificial Sequence; identical to SEQ ID NO: 77
  source: /note="Description of Artificial Sequence: Synthetic polypeptide"

SEQ ID NO: 948 - protein, 124 aa, Artificial Sequence
  source: /note="Description of Artificial Sequence: Synthetic polypeptide"
EVQLVQSGAEVKKPGASVKVSCKASGYTFTNYGINWVRQAPGQGLEWMGWINTYTGKPTYAQKFQGRVTMTTDTSTSTAYMELSSLRSEDTAVYYCARKLFFTEDVTDYAMDYWGQGTTVTVSS

SEQ ID NO: 949 - protein, 124 aa, Artificial Sequence
  source: /note="Description of Artificial Sequence: Synthetic polypeptide"
EVQLVQSGAEVKKPGASVKVSCKASGYTFNNYGINWVRQAPGQGLEWMGWINTYTGKPTYAQKFQGRVTMTTDTSTSTAYMELSSLRSEDTAVYFCARKFFTPVVVTDNAMDYWGQGTTVTVSS

SEQ ID NO: 950 - protein, 124 aa, Artificial Sequence; identical to SEQ ID NO: 80
  source: /note="Description of Artificial Sequence: Synthetic polypeptide"

SEQ ID NO: 951 - protein, 124 aa, Artificial Sequence; identical to SEQ ID NO: 74
  source: /note="Description of Artificial Sequence: Synthetic polypeptide"

SEQ ID NO: 952 - protein, 124 aa, Artificial Sequence; identical to SEQ ID NO: 75
  source: /note="Description of Artificial Sequence: Synthetic polypeptide"

SEQ ID NO: 953 - protein, 124 aa, Artificial Sequence
  source: /note="Description of Artificial Sequence: Synthetic polypeptide"
EVQLVQSGAEVKKPGASVKVSCKASGYTFSNYGIIWVRQAPGQGLEWMGWINTYTGKPSYAQKFQGRVTMTTDTSTSTAYMELSSLRSEDTAVYYCARKLFNTVDVTDNAMDYWGQGTTVTVSS

SEQ ID NO: 954 - protein, 124 aa, Artificial Sequence; identical to SEQ ID NO: 82
  source: /note="Description of Artificial Sequence: Synthetic polypeptide"

SEQ ID NO: 955 - protein, 124 aa, Artificial Sequence; identical to SEQ ID NO: 83
  source: /note="Description of Artificial Sequence: Synthetic polypeptide"

SEQ ID NO: 956 - protein, 124 aa, Artificial Sequence
  source: /note="Description of Artificial Sequence: Synthetic polypeptide"
EVQLVQSGAEVKKPGASVKVSCKASGYTFNNYGIIWVRQAPGQGLEWMGWINTYTGKPTYAQKFQGRVTMTTDTSTSTAYMELSSLRSEDTAVYYCARKFFTTMAVTDNAMDYWGQGTTVTVSS

SEQ ID NO: 957 - protein, 107 aa, Artificial Sequence
  source: /note="Description of Artificial Sequence: Synthetic polypeptide"
DIQMTQSPSSLSASVGDRVTITCRASQDISNYLNWYQQKPGKAPKLLIYYTSRLQSGVPSRFSGSGSGTDYTLTISSLQPEDFATYYCQQGNTLPPTFGQGTKLEIK

SEQ ID NO: 958 - protein, 107 aa, Artificial Sequence
  source: /note="Description of Artificial Sequence: Synthetic polypeptide"
DIQMTQSPSSLSASVGDRVTITCRASQDISNYLNWYQQKPGKAPKLLIYYASRLQSGVPSRFSGSGSGTDYTLTISSLQPEDFATYFCQQGNTLPPTFGQGTKLEIK

SEQ ID NO: 959 - protein, 107 aa, Artificial Sequence
  source: /note="Description of Artificial Sequence: Synthetic polypeptide"
DIQMTQSPSSLSASVGDRVTITCRASQDISNYLNWYQQKPGKTVKLLIYYTSRLQSGVPSRFSGSGSGTDYTLTISSLQPEDFATYFCQQGNTLPPTFGQGTKLEIK

SEQ ID NO: 960 - protein, 107 aa, Artificial Sequence
  source: /note="Description of Artificial Sequence: Synthetic polypeptide"
DIQMTQSPSSLSASVGDRVTITCRASQDIWNYLNWYQQKPGKAPKLLIYYTSRLQSGVPSRFSGSGSGTDFTLTISSLQPEDFATYFCQQGNRYPPTFGQGTKLEIK

SEQ ID NO: 961 - protein, 107 aa, Artificial Sequence
  source: /note="Description of Artificial Sequence: Synthetic polypeptide"
DIQMTQSPSSLSASVGDRVTITCRASQDICTYLNWYQQKPGKAPKLLIYYTSRLQSGVPSRFSGSGSGTDFTLTISSLQPEDFATYYCQQGNSPPPTFGQGTKLEIK

SEQ ID NO: 962 - protein, 107 aa, Artificial Sequence
  source: /note="Description of Artificial Sequence: Synthetic polypeptide"
DIQMTQSPSSLSASVGDRVTITCRASQAIGNYLNWYQQKPGKAPKLLIYYASRLQSGVPSRFSGSGSGTDFTLTISSLQPEDFATYFCQQGNTLPPTFGQGTKLEIK

SEQ ID NO: 963 - protein, 107 aa, Artificial Sequence
  source: /note="Description of Artificial Sequence: Synthetic polypeptide"
DIQMTQSPSSLSASVGDRVTITCRASQDISNYLNWYQQKPGKAPKLLIYYTSRLQSGVPSRFSGSGSGTDYTLTISSLQPEDFATYFCQQGNTRPPTFGQGTKLEIK

SEQ ID NO: 964 - protein, 107 aa, Artificial Sequence
  source: /note="Description of Artificial Sequence: Synthetic polypeptide"
DIQMTQSPSSLSASVGDRVTITCRASQDISNYLNWYQQKPGKAPKLLIYYTSLLQSGVPSRFSGSGSGTDYTLTISSLQPEDFATYYCQQGNTGPPTFGQGTKLEIK

SEQ ID NO: 965 - protein, 107 aa, Artificial Sequence
  source: /note="Description of Artificial Sequence: Synthetic polypeptide"
DIQMTQSPSSLSASVGDRVTITCRASQDIYNYLNWYQQKPGKAPKLLIYYTSRLQSGVPSRFSGSGSGTDYTLTISSLQPEDFATYFCQQGNTLPPTFGQGTKLEIK

SEQ ID NO: 966 - protein, 107 aa, Artificial Sequence
  source: /note="Description of Artificial Sequence: Synthetic polypeptide"
DIQMTQSPSSLSASVGDRVTITCRASQDISHYLNWYQQKPGKAPKLLIYYTSRLQSGVPSRFSGSGSGTDYTLTISSLQPEDFATYFCQQGNTLPATFGQGTKLEIK

SEQ ID NO: 967 - protein, 107 aa, Artificial Sequence
  source: /note="Description of Artificial Sequence: Synthetic polypeptide"
DIQMTQSPSSLSASVGDRVTITCRASQDISSYLNWYQQKPGKTVKLLIYYASRLQSGVPSRFSGSGSGTDFTLTISSLQPEDFATYYCQQGNTPPPTFGQGTKLEIK

SEQ ID NO: 968 - protein, 107 aa, Artificial Sequence
  source: /note="Description of Artificial Sequence: Synthetic polypeptide"
DIQMTQSPSSLSASVGDRVTITCRASQDISSYLNWYQQKPGKAPKLLIYYASRLQSGVPSRFSGSGSGTDFTLTISSLQPEDFATYYCQQGNTLPPTFGQGTKLEIK

SEQ ID NO: 969 - protein, 107 aa, Artificial Sequence
  source: /note="Description of Artificial Sequence: Synthetic polypeptide"
DIQMTQSPSSLSASVGDRVTITCRASQEISNYLNWYQQKPGKAPKLLIYYTSRLQSGVPSRFSGSGSGTDYTLTISSLQPEDFATYFCQQGNTMPTTFGQGTKLEIK

SEQ ID NO: 970 - protein, 107 aa, Artificial Sequence
  source: /note="Description of Artificial Sequence: Synthetic polypeptide"
DIQMTQSPSSLSASVGDRVTITCRASQDISNYLNWYQQKPGKAPKLLIYFASRLQSGVPSRFSGSGSGTDYTLTISSLQPEDFATYFCQQGNTPPTTFGQGTKLEIK

SEQ ID NO: 971 - protein, 107 aa, Artificial Sequence
  source: /note="Description of Artificial Sequence: Synthetic polypeptide"
DIQMTQSPSSLSASVGDRVTITCRASQDISNYLNWYQQKPGKAPKLLIYYTSRLQSGVPSRFSGSGSGTDYTLTISSLQPEDFATYFCQQGNTLPSTFGQGTKLEIK

SEQ ID NO: 972 - protein, 107 aa, Artificial Sequence
  source: /note="Description of Artificial Sequence: Synthetic polypeptide"
DIQMTQSPSSLSASVGDRVTITCRASQVISNTLNWYQQKPGKAPKLLIYYTSRLQSGVPSRFSGSGSGTDYTLTISSLQPEDFATYFCQQGNALPPTFGQGTKLEIK

SEQ ID NO: 973 - protein, 107 aa, Artificial Sequence
  source: /note="Description of Artificial Sequence: Synthetic polypeptide"
DIQMTQSPSSLSASVGDRVTITCRASQDISTYLNWYQQKPGKAPKLLIYYTSRLQSGVPSRFSGSGSGTDFTLTISSLQPEDFATYFCQQGNTPPPTFGQGTKLEIK

SEQ ID NO: 974 - protein, 107 aa, Artificial Sequence
  source: /note="Description of Artificial Sequence: Synthetic polypeptide"
DIQMTQSPSSLSASVGDRVTITCRASQDISQYLNWYQQKPGKAPKLLIYYTSRLQSGVPSRFSGSGSGTDYTLTISSLQPEDFATYYCQQGNTLPPTFGQGTKLEIK

SEQ ID NO: 975 - protein, 107 aa, Artificial Sequence
  source: /note="Description of Artificial Sequence: Synthetic polypeptide"
DIQMTQSPSSLSASVGDRVTITCRASQDITNYLNWYQQKPGKAPKLLIYYTSRLQSGVPSRFSGSGSGTDFTLTISSLQPEDFATYYCQQGNTAPPTFGQGTKLEIK

SEQ ID NO: 976 - protein, 107 aa, Artificial Sequence
  source: /note="Description of Artificial Sequence: Synthetic polypeptide"
DIQMTQSPSSLSASVGDRVTITCRASQGISNYLNWYQQKPGKAPKLLIYYTSRLQSGVPSRFSGSGSGTDYTLTISSLQPEDFATYFCQQGNTMPPTFGQGTKLEIK

SEQ ID NO: 977 - protein, 107 aa, Artificial Sequence
  source: /note="Description of Artificial Sequence: Synthetic polypeptide"
DIQMTQSPSSLSASVGDRVTITCRASQDISNYLNWYQQKPGKAPKLLIYYTSRLQSGVPSRFSGSGSGTDFTLTISSLQPEDFATYFCQQGNTLPPTFGQGTKLEIK

SEQ ID NO: 978 - protein, 107 aa, Artificial Sequence
  source: /note="Description of Artificial Sequence: Synthetic polypeptide"
DIQMTQSPSSLSASVGDRVTITCRASQDISKYLNWYQQKPGKAPKLLIYYTSRLQSGVPSRFSGSGSGTDFTLTISSLQPEDFATYYCQQGNTRPPTFGQGTKLEIK

SEQ ID NO: 979 - protein, 107 aa, Artificial Sequence
  source: /note="Description of Artificial Sequence: Synthetic polypeptide"
DIQMTQSPSSLSASVGDRVTITCRASQDISNYLNWYQQKPGKAPKLLIYYTSLLQSGVPSRFSGSGSGTDFTLTISSLQPEDFATYYCQQGNTQPPTFGQGTKLEIK

SEQ ID NO: 980 - protein, 107 aa, Artificial Sequence
  source: /note="Description of Artificial Sequence: Synthetic polypeptide"
DIQMTQSPSSLSASVGDRVTITCRASQDISNYLNWYQQKPGKAPKLLIYYTSRLQSGVPSRFSGSGSGTDFTLTISSLQPEDFATYYCQQGNSQPPTFGQGTKLEIK

SEQ ID NO: 981 - protein, 107 aa, Artificial Sequence
  source: /note="Description of Artificial Sequence: Synthetic polypeptide"
DIQMTQSPSSLSASVGDRVTITCRASQDISKYLNWYQQKPGKAPKLLIYNASRLQSGVPSRFSGSGSGTDFTLTISSLQPEDFATYFCQQGNTLPPTFGQGTKLEIK

SEQ ID NO: 982 - protein, 107 aa, Artificial Sequence
  source: /note="Description of Artificial Sequence: Synthetic polypeptide"
DIQMTQSPSSLSASVGDRVTITCRASQDISNYLNWYQQKPGKAPKLLIYYTSLLQSGVPSRFSGSGSGTDFTLTISSLQPEDFATYYCQQGNIWPPTFGQGTKLEIK

SEQ ID NO: 983 - protein, 107 aa, Artificial Sequence
  source: /note="Description of Artificial Sequence: Synthetic polypeptide"
DIQMTQSPSSLSASVGDRVTITCRASQDISHYLNWYQQKPGKAPKLLIYYTSRLQSGVPSRFSGSGSGTDYTLTISSLQPEDFATYFCQQGNTLPPTFGQGTKLEIK

SEQ ID NO: 984 - protein, 107 aa, Artificial Sequence
  source: /note="Description of Artificial Sequence: Synthetic polypeptide"
DIQMTQSPSSLSASVGDRVTITCRASQDISNYLNWYQQKPGKAPKLLIYYTSRLQSGVPSRFSGSGSGTDYTLTISSLQPEDFATYYCQQGNTFPPTFGQGTKLEIK

SEQ ID NO: 985 - protein, 107 aa, Artificial Sequence
  source: /note="Description of Artificial Sequence: Synthetic polypeptide"
DIQMTQSPSSLSASVGDRVTITCRASQDISNYLNWYQQKPGKAPKLLIYYTSRLQSGVPSRFSGSGSGTDYTLTISSLQPEDFATYFCQQGNTQPPTFGQGTKLEIK

SEQ ID NO: 986 - protein, 107 aa, Artificial Sequence
  source: /note="Description of Artificial Sequence: Synthetic polypeptide"
DIQMTQSPSSLSASVGDRVTITCRASQDISNVLNWYQQKPGKAPKLLIYYASRLQSGVPSRFSGSGSGTDFTLTISSLQPEDFATYYCQQGNTLPPTFGQGTKLEIK

SEQ ID NO: 987 - protein, 107 aa, Artificial Sequence
  source: /note="Description of Artificial Sequence: Synthetic polypeptide"
DIQMTQSPSSLSASVGDRVTITCRASQDIYKYLNWYQQKPGKAPKLLIYYTSRLQSGVPSRFSGSGSGTDFTLTISSLQPEDFATYYCQQGNTMPPTFGQGTKLEIK

SEQ ID NO: 988 - protein, 107 aa, Artificial Sequence
  source: /note="Description of Artificial Sequence: Synthetic polypeptide"
DIQMTQSPSSLSASVGDRVTITCRASQEIFSYLNWYQQKPGKAPKLLIYYTSRLQSGVPSRFSGSGSGTDFTLTISSLQPEDFATYYCQQGNMGPPTFGQGTKLEIK

SEQ ID NO: 989 - protein, 107 aa, Artificial Sequence
  source: /note="Description of Artificial Sequence: Synthetic polypeptide"
DIQMTQSPSSLSASVGDRVTITCRASQDISNYLNWYQQKPGKAPKLLIYYTSRLQSGVPSRFSGSGSGTDYTLTISSLQPEDFATYYCQQGNTQPPTFGQGTKLEIK

SEQ ID NO: 990 - protein, 107 aa, Artificial Sequence
  source: /note="Description of Artificial Sequence: Synthetic polypeptide"
DIQMTQSPSSLSASVGDRVTITCRASQDISSYLNWYQQKPGKAPKLLIYYASRLQSGVPSRFSGSGSGTDFTLTISSLQPEDFATYYCQQGNTWPPTFGQGTKLEIK

SEQ ID NO: 991 - protein, 107 aa, Artificial Sequence
  source: /note="Description of Artificial Sequence: Synthetic polypeptide"
DIQMTQSPSSLSASVGDRVTITCRASQDISNYLNWYQQKPGKAPKLLIYYTSRLQSGVPSRFSGSGSGTDFTLTISSLQPEDFATYYCQQGNTRPPTFGQGTKLEIK

SEQ ID NO: 992 - protein, 107 aa, Artificial Sequence
  source: /note="Description of Artificial Sequence: Synthetic polypeptide"
DIQMTQSPSSLSASVGDRVTITCRASQDISNFLNWYQQKPGKAPKLLIYYASRLQSGVPSRFSGSGSGTDFTLTISSLQPEDFATYFCQQGNTFPPTFGQGTKLEIK

SEQ ID NO: 993 - protein, 107 aa, Artificial Sequence
  source: /note="Description of Artificial Sequence: Synthetic polypeptide"
DIQMTQSPSSLSASVGDRVTITCRASQDISNFLNWYQQKPGKAPKLLIYYTSRLQSGVPSRFSGSGSGTDYTLTISSLQPEDFATYFCQQGNTRPPTFGQGTKLEIK

SEQ ID NO: 994 - protein, 107 aa, Artificial Sequence
  source: /note="Description of Artificial Sequence: Synthetic polypeptide"
DIQMTQSPSSLSASVGDRVTITCRASQDINNYLNWYQQKPGKAPKLLIYYTSRLQSGVPSRFSGSGSGTDFTLTISSLQPEDFATYFCQQGNTQPPTFGQGTKLEIK

SEQ ID NO: 995 - protein, 107 aa, Artificial Sequence
  source: /note="Description of Artificial Sequence: Synthetic polypeptide"
DIQMTQSPSSLSASVGDRVTITCRASQDISNYLNWYQQKPGKAPKLLIYYASGLQSGVPSRFSGSGSGTDYTLTISSLQPEDFATYFCQQGNTWPPTFGQGTKLEIK

SEQ ID NO: 996 - protein, 107 aa, Artificial Sequence
  source: /note="Description of Artificial Sequence: Synthetic polypeptide"
DIQMTQSPSSLSASVGDRVTITCRASQDISRYLNWYQQKPGKAPKLLIYYTSRLQSGVPSRFSGSGSGTDFTLTISSLQPEDFATYYCQQGNTQPPTFGQGTKLEIK

SEQ ID NO: 997 - protein, 107 aa, Artificial Sequence
  source: /note="Description of Artificial Sequence: Synthetic polypeptide"
DIQMTQSPSSLSASVGDRVTITCRASQDIATYLNWYQQKPGKAPKLLIYYTSRLQSGVPSRFSGSGSGTDFTLTISSLQPEDFATYFCQQGNTMPPTFGQGTKLEIK

SEQ ID NO: 998 - protein, 107 aa, Artificial Sequence
  source: /note="Description of Artificial Sequence: Synthetic polypeptide"
DIQMTQSPSSLSASVGDRVTITCRASQDISNYLNWYQQKPGKAPKLLIYYTSRLQSGVPSRFSGSGSGTDYTLTISSLQPEDFATYFCQQGNTFPPTFGQGTKLEIK

SEQ ID NO: 999 - protein, 107 aa, Artificial Sequence
  source: /note="Description of Artificial Sequence: Synthetic polypeptide"
DIQMTQSPSSLSASVGDRVTITCRASQRIGNYLNWYQQKPGKTVKLLIYYASRLQSGVPSRFSGSGSGTDFTLTISSLQPEDFATYFCQQGNTLPPTFGQGTKLEIK

SEQ ID NO: 1000 - protein, 107 aa, Artificial Sequence
  source: /note="Description of Artificial Sequence: Synthetic polypeptide"
DIQMTQSPSSLSASVGDRVTITCRASQEISNYLNWYQQKPGKAPKLLIYYTSRLQSGVPSRFSGSGSGTDYTLTISSLQPEDFATYYCQQGNSQPPTFGQGTKLEIK

SEQ ID NO: 1001 - protein, 107 aa, Artificial Sequence
  source: /note="Description of Artificial Sequence: Synthetic polypeptide"
DIQMTQSPSSLSASVGDRVTITCRASQDIANYLNWYQQKPGKAPKLLIYYTSRLQSGVPSRFSGSGSGTDFTLTISSLQPEDFATYYCQQGNTLPPTFGQGTKLEIK

SEQ ID NO: 1002 - protein, 107 aa, Artificial Sequence
  source: /note="Description of Artificial Sequence: Synthetic polypeptide"
DIQMTQSPSSLSASVGDRVTITCRASQDISNYLNWYQQKPGKAPKLLIYYASRLQSGVPSRFSGSGSGTDYTLTISSLQPEDFATYFCQQGNTFPPTFGQGTKLEIK

SEQ ID NO: 1003 - protein, 107 aa, Artificial Sequence
  source: /note="Description of Artificial Sequence: Synthetic polypeptide"
DIQMTQSPSSLSASVGDRVTITCRASQDISNYLNWYQQKPGKAPKLLIYYTSRLQSGVPSRFSGSGSGTDFTLTISSLQPEDFATYYCQQGNTQPPTFGQGTKLEIK

SEQ ID NO: 1004 - protein, 107 aa, Artificial Sequence
  source: /note="Description of Artificial Sequence: Synthetic polypeptide"
DIQMTQSPSSLSASVGDRVTITCRASQDISNYLNWYQQKPGKAPKLLIYYTSRLQSGVPSRFSGSGSGTDYTLTISSLQPEDFATYFCQQGNTPPPTFGQGTKLEIK

SEQ ID NO: 1005 - protein, 107 aa, Artificial Sequence
  source: /note="Description of Artificial Sequence: Synthetic polypeptide"
DIQMTQSPSSLSASVGDRVTITCRASQDISNFLNWYQQKPGKAPKLLIYYTSRLQSGVPSRFSGSGSGTDYTLTISSLQPEDFATYYCQQGNTLPPTFGQGTKLEIK

SEQ ID NO: 1006 - protein, 107 aa, Artificial Sequence
  source: /note="Description of Artificial Sequence: Synthetic polypeptide"
DIQMTQSPSSLSASVGDRVTITCRASQDIGNFLNWYQQKPGKAPKLLIYYTSRLQSGVPSRFSGSGSGTDYTLTISSLQPEDFATYFCQQGNTRPPTFGQGTKLEIK

SEQ ID NO: 1007 - protein, 107 aa, Artificial Sequence
  source: /note="Description of Artificial Sequence: Synthetic polypeptide"
DIQMTQSPSSLSASVGDRVTITCRASQDITNYLNWYQQKPGKAPKLLIYYTSRLQSGVPSRFSGSGSGTDYTLTISSLQPEDFATYYCQQGNTPPPTFGQGTKLEIK

SEQ ID NO: 1008 - protein, 107 aa, Artificial Sequence
  source: /note="Description of Artificial Sequence: Synthetic polypeptide"
DIQMTQSPSSLSASVGDRVTITCRASQDISDYLNWYQQKPGKAPKLLIYYTSRLQSGVPSRFSGSGSGTDYTLTISSLQPEDFATYFCQQGNMWPPTFGQGTKLEIK

SEQ ID NO: 1009 - protein, 107 aa, Artificial Sequence
  source: /note="Description of Artificial Sequence: Synthetic polypeptide"
DIQMTQSPSSLSASVGDRVTITCRASQDISSYLNWYQQKPGKAPKLLIYYASRLQSGVPSRFSGSGSGTDFTLTISSLQPEDFATYFCQQGNTMPPTFGQGTKLEIK

SEQ ID NO: 1010 - protein, 107 aa, Artificial Sequence
  source: /note="Description of Artificial Sequence: Synthetic polypeptide"
DIQMTQSPSSLSASVGDRVTITCRASQDISHYLNWYQQKPGKAPKLLIYYTSRLQSGVPSRFSGSGSGTDFTLTISSLQPEDFATYYCQQGNTLPPTFGQGTKLEIK

SEQ ID NO: 1011 - protein, 107 aa, Artificial Sequence
  source: /note="Description of Artificial Sequence: Synthetic polypeptide"
DIQMTQSPSSLSASVGDRVTITCRASQDISNYLNWYQQKPGKAPKLLIYYASRLQSGVPSRFSGSGSGTDFTLTISSLQPEDFATYFCQQGNTMPPTFGQGTKLEIK

SEQ ID NO: 1012 - protein, 107 aa, Artificial Sequence
  source: /note="Description of Artificial Sequence: Synthetic polypeptide"
DIQMTQSPSSLSASVGDRVTITCRASQDISQYLNWYQQKPGKAPKLLIYYTSRLQSGVPSRFSGSGSGTDFTLTISSLQPEDFATYFCQQGNTRPPTFGQGTKLEIK

SEQ ID NO: 1013 - protein, 107 aa, Artificial Sequence
  source: /note="Description of Artificial Sequence: Synthetic polypeptide"
DIQMTQSPSSLSASVGDRVTITCRASQDISNYLNWYQQKPGKAPKLLIYYTSRLQSGVPSRFSGSGSGTDYTLTISSLQPEDFATYFCQQGNMRPPTFGQGTKLEIK

SEQ ID NO: 1014 - protein, 107 aa, Artificial Sequence
  source: /note="Description of Artificial Sequence: Synthetic polypeptide"
DIQMTQSPSSLSASVGDRVTITCRASQDISTYLNWYQQKPGKAPKLLIYYASRLQSGVPSRFSGSGSGTDFTLTISSLQPEDFATYFCQQGNTLPPTFGQGTKLEIK

SEQ ID NO: 1015 - protein, 107 aa, Artificial Sequence
  source: /note="Description of Artificial Sequence: Synthetic polypeptide"
DIQMTQSPSSLSASVGDRVTITCRASQDISNYLNWYQQKPGKAPKLLIYYTSRLQSGVPSRFSGSGSGTDYTLTISSLQPEDFATYFCQQGNTGPPTFGQGTKLEIK

SEQ ID NO: 1016 - protein, 107 aa, Artificial Sequence
  source: /note="Description of Artificial Sequence: Synthetic polypeptide"
DIQMTQSPSSLSASVGDRVTITCRASQNINNYLNWYQQKPGKAPKLLIYYTSRLQSGVPSRFSGSGSGTDYTLTISSLQPEDFATYFCQQGNTMPPTFGQGTKLEIK

SEQ ID NO: 1017 - protein, 107 aa, Artificial Sequence
  source: /note="Description of Artificial Sequence: Synthetic polypeptide"
DIQMTQSPSSLSASVGDRVTITCRASQDISKYLNWYQQKPGKAPKLLIYYTSRLQSGVPSRFSGSGSGTDYTLTISSLQPEDFATYYCQQGNTPPPTFGQGTKLEIK

SEQ ID NO: 1018 - protein, 107 aa, Artificial Sequence
  source: /note="Description of Artificial Sequence: Synthetic polypeptide"
DIQMTQSPSSLSASVGDRVTITCRASQDISNYLNWYQQKPGKAPKLLIYYTSRLQSGVPSRFSGSGSGTDFTLTISSLQPEDFATYYCQQGNTVPPTFGQGTKLEIK

SEQ ID NO: 1019 - protein, 107 aa, Artificial Sequence
  source: /note="Description of Artificial Sequence: Synthetic polypeptide"
DIQMTQSPSSLSASVGDRVTITCRASQDISNYLNWYQQKPGKAPKLLIYYTSKLQSGVPSRFSGSGSGTDYTLTISSLQPEDFATYFCQQGNIFPPTFGQGTKLEIK

SEQ ID NO: 1020 - protein, 107 aa, Artificial Sequence
  source: /note="Description of Artificial Sequence: Synthetic polypeptide"
DIQMTQSPSSLSASVGDRVTITCRASQGIYNYLNWYQQKPGKAPKLLIYYTSRLQSGVPSRFSGSGSGTDYTLTISSLQPEDFATYFCQQGNTLPPTFGQGTKLEIK

SEQ ID NO: 1021 - protein, 107 aa, Artificial Sequence
  source: /note="Description of Artificial Sequence: Synthetic polypeptide"
DIQMTQSPSSLSASVGDRVTITCRASQDISSYLNWYQQKPGKAPKLLIYYTSRLQSGVPSRFSGSGSGTDFTLTISSLQPEDFATYYCQQGNTLPPTFGQGTKLEIK

SEQ ID NO: 1022 - protein, 107 aa, Artificial Sequence
  source: /note="Description of Artificial Sequence: Synthetic polypeptide"
DIQMTQSPSSLSASVGDRVTITCRASQEISNYLNWYQQKPGKAPKLLIYYTSRLQSGVPSRFSGSGSGTDYTLTISSLQPEDFATYFCQQGNTGPPTFGQGTKLEIK

SEQ ID NO: 1023 - protein, 107 aa, Artificial Sequence
  source: /note="Description of Artificial Sequence: Synthetic polypeptide"
DIQMTQSPSSLSASVGDRVTITCRASQDISNYLNWYQQKPGKAPKLLIYYTSRLQSGVPSRFSGSGSGTDFTLTISSLQPEDFATYYCQQGNTPPPTFGQGTKLEIK

SEQ ID NO: 1024 - protein, 107 aa, Artificial Sequence
  source: /note="Description of Artificial Sequence: Synthetic polypeptide"
DIQMTQSPSSLSASVGDRVTITCRASQDISDYLNWYQQKPGKAPKLLIYYTSRLQSGVPSRFSGSGSGTDYTLTISSLQPEDFATYYCQQGNTWPPTFGQGTKLEIK

SEQ ID NO: 1025 - protein, 107 aa, Artificial Sequence
  source: /note="Description of Artificial Sequence: Synthetic polypeptide"
DIQMTQSPSSLSASVGDRVTITCRASQDIWKYLNWYQQKPGKAPKLLIYYASRLQSGVPSRFSGSGSGTDFTLTISSLQPEDFATYYCQQGNTLPPTFGQGTKLEIK

SEQ ID NO: 1026 - protein, 107 aa, Artificial Sequence
  source: /note="Description of Artificial Sequence: Synthetic polypeptide"
DIQMTQSPSSLSASVGDRVTITCRASQDISTYLNWYQQKPGKAPKLLIYYTSRLQSGVPSRFSGSGSGTDYTLTISSLQPEDFATYYCQQGNTWPPTFGQGTKLEIK

SEQ ID NO: 1027 - protein, 107 aa, Artificial Sequence
  source: /note="Description of Artificial Sequence: Synthetic polypeptide"
DIQMTQSPSSLSASVGDRVTITCRASQDISNYLNWYQQKPGKAPKLLIYYTSRLQSGVPSRFSGSGSGTDYTLTISSLQPEDFATYYCQQGNTPPPTFGQGTKLEIK

SEQ ID NO: 1028 - protein, 107 aa, Artificial Sequence
  source: /note="Description of Artificial Sequence: Synthetic polypeptide"
DIQMTQSPSSLSASVGDRVTITCRASQDISNYLNWYQQKPGKAPKLLIYYTSRLQSGVPSRFSGSGSGTDFTLTISSLQPEDFATYFCQQGNAPPPTFGQGTKLEIK

SEQ ID NO: 1029 - protein, 107 aa, Artificial Sequence
  source: /note="Description of Artificial Sequence: Synthetic polypeptide"
DIQMTQSPSSLSASVGDRVTITCRASQDIYKFLNWYQQKPGKAPKLLIYYTSRLQSGVPSRFSGSGSGTDYTLTISSLQPEDFATYFCQQGNTLPPTFGQGTKLEIK

SEQ ID NO: 1030 - protein, 107 aa, Artificial Sequence
  source: /note="Description of Artificial Sequence: Synthetic polypeptide"
DIQMTQSPSSLSASVGDRVTITCRASQDIFNYLNWYQQKPGKAPKLLIYYTSRLQSGVPSRFSGSGSGTDYTLTISSLQPEDFATYFCQQGNTLPPTFGQGTKLEIK

SEQ ID NO: 1031 - protein, 107 aa, Artificial Sequence
  source: /note="Description of Artificial Sequence: Synthetic polypeptide"
DIQMTQSPSSLSASVGDRVTITCRASQDISNTLNWYQQKPGKAPKLLIYYASRLQSGVPSRFSGSGSGTDFTLTISSLQPEDFATYFCQQGNTLPPTFGQGTKLEIK

SEQ ID NO: 1032 - protein, 107 aa, Artificial Sequence
  source: /note="Description of Artificial Sequence: Synthetic polypeptide"
DIQMTQSPSSLSASVGDRVTITCRASQHISNYLNWYQQKPGKAPKLLIYYTSRLQSGVPSRFSGSGSGTDYTLTISSLQPEDFATYFCQQGNTQPPTFGQGTKLEIK

SEQ ID NO: 1033 - protein, 107 aa, Artificial Sequence
  source: /note="Description of Artificial Sequence: Synthetic polypeptide"
DIQMTQSPSSLSASVGDRVTITCRASQDISNYLNWYQQKPGKAPKLLIYYTSRLQSGVPSRFSGSGSGTDYTLTISSLQPEDFATYFCQQGNMPPPTFGQGTKLEIK

SEQ ID NO: 1034 - protein, 107 aa, Artificial Sequence
  source: /note="Description of Artificial Sequence: Synthetic polypeptide"
DIQMTQSPSSLSASVGDRVTITCRASQDITNYLNWYQQKPGKAPKLLIYYTSRLQSGVPSRFSGSGSGTDFTLTISSLQPEDFATYFCQQGNTVPPTFGQGTKLEIK

SEQ ID NO: 1035 - protein, 107 aa, Artificial Sequence
  source: /note="Description of Artificial Sequence: Synthetic polypeptide"
DIQMTQSPSSLSASVGDRVTITCRASQDISNYLNWYQQKPGKAPKLLIYFTSRLQSGVPSRFSGSGSGTDFTLTISSLQPEDFATYYCQQGNTQPPTFGQGTKLEIK

SEQ ID NO: 1036 - protein, 107 aa, Artificial Sequence
  source: /note="Description of Artificial Sequence: Synthetic polypeptide"
DIQMTQSPSSLSASVGDRVTITCRASQDISKFLNWYQQKPGKAPKLLIYYTSRLQSGVPSRFSGSGSGTDYTLTISSLQPEDFATYYCQQGNTRPPTFGQGTKLEIK

SEQ ID NO: 1037 - protein, 107 aa, Artificial Sequence
  source: /note="Description of Artificial Sequence: Synthetic polypeptide"
DIQMTQSPSSLSASVGDRVTITCRASQDISNYLNWYQQKPGKAPKLLIYYTSRLQSGVPSRFSGSGSGTDFTLTISSLQPEDFATYFCQQGNTFPPTFGQGTKLEIK

SEQ ID NO: 1038 - protein, 107 aa, Artificial Sequence
  source: /note="Description of Artificial Sequence: Synthetic polypeptide"
DIQMTQSPSSLSASVGDRVTITCRASQDIYNVLNWYQQKPGKAPKLLIYYASRLQSGVPSRFSGSGSGTDFTLTISSLQPEDFATYFCQQGITLPPTFGQGTKLEIK

SEQ ID NO: 1039 - protein, 107 aa, Artificial Sequence
  source: /note="Description of Artificial Sequence: Synthetic polypeptide"
DIQMTQSPSSLSASVGDRVTITCRASQHISNYLNWYQQKPGKAPKLLIYYTSRLQSGVPSRFSGSGSGTDYTLTISSLQPEDFATYFCQQGNTWPPTFGQGTKLEIK

SEQ ID NO: 1040 - protein, 107 aa, Artificial Sequence
  source: /note="Description of Artificial Sequence: Synthetic polypeptide"
DIQMTQSPSSLSASVGDRVTITCRASQDISNYLNWYQQKPGKAPKLLIYYTSRLQSGVPSRFSGSGSGTDYTLTISSLQPEDFATYFCQQGNTQPSTFGQGTKLEIK

SEQ ID NO: 1041 - protein, 107 aa, Artificial Sequence
  source: /note="Description of Artificial Sequence: Synthetic polypeptide"
DIQMTQSPSSLSASVGDRVTITCRASQDISNYLNWYQQKPGKAPKLLIYYTSRLQSGVPSRFSGSGSGTDFTLTISSLQPEDFATYFCQQGNTQPPTFGQGTKLEIK

SEQ ID NO: 1042 - protein, 107 aa, Artificial Sequence; identical to SEQ ID NO: 85
  source: /note="Description of Artificial Sequence: Synthetic polypeptide"

SEQ ID NO: 1043 - protein, 107 aa, Artificial Sequence; identical to SEQ ID NO: 86
  source: /note="Description of Artificial Sequence: Synthetic polypeptide"

SEQ ID NO: 1044 - protein, 107 aa, Artificial Sequence; identical to SEQ ID NO: 88
  source: /note="Description of Artificial Sequence: Synthetic polypeptide"

SEQ ID NO: 1045 - protein, 107 aa, Artificial Sequence; identical to SEQ ID NO: 84
  source: /note="Description of Artificial Sequence: Synthetic polypeptide"

SEQ ID NO: 1046 - protein, 107 aa, Artificial Sequence; identical to SEQ ID NO: 89
  source: /note="Description of Artificial Sequence: Synthetic polypeptide"

SEQ ID NO: 1047 - protein, 107 aa, Artificial Sequence; identical to SEQ ID NO: 87
  source: /note="Description of Artificial Sequence: Synthetic polypeptide"

SEQ ID NO: 1048 - protein, 107 aa, Artificial Sequence
  source: /note="Description of Artificial Sequence: Synthetic polypeptide"
DIQMTQSPSSLSASVGDRVTITCRASQNIENFLNWYQQKPGKAPKLLIYYTSRLQSGVPSRFSGSGSGTDFTLTISSLQPEDFATYFCQQGNTWPPTFGQGTKLEIK

SEQ ID NO: 1049 - protein, 107 aa, Artificial Sequence
  source: /note="Description of Artificial Sequence: Synthetic polypeptide"
DIQMTQSPSSLSASVGDRVTITCRASQDIYNYLNWYQQKPGKAPKLLIYYTSRLQSGVPSRFSGSGSGTDYTLTISSLQPEDFATYFCQQGNTPPPTFGQGTKLEIK

SEQ ID NO: 1050 - protein, 107 aa, Artificial Sequence
  source: /note="Description of Artificial Sequence: Synthetic polypeptide"
DIQMTQSPSSLSASVGDRVTITCRASQDIASYLNWYQQKPGKAPKLLIYYTSRLQSGVPSRFSGSGSGTDFTLTISSLQPEDFATYFCQQGNTQPPTFGQGTKLEIK

SEQ ID NO: 1051 - protein, 107 aa, Artificial Sequence
  source: /note="Description of Artificial Sequence: Synthetic polypeptide"
DIQMTQSPSSLSASVGDRVTITCRASQDISNYLNWYQQKPGKVPKLLIYYTSRLQSGVPSRFSGSGSGTDYTLTISSLQPEDFATYFCQQGNTQPPTFGQGTKLEIK

SEQ ID NO: 1052 - protein, 107 aa, Artificial Sequence; identical to SEQ ID NO: 92
  source: /note="Description of Artificial Sequence: Synthetic polypeptide"

SEQ ID NO: 1053 - protein, 124 aa, Artificial Sequence; identical to SEQ ID NO: 74
  source: /note="Description of Artificial Sequence: Synthetic polypeptide"

SEQ ID NO: 1054 - protein, 124 aa, Artificial Sequence; identical to SEQ ID NO: 75
  source: /note="Description of Artificial Sequence: Synthetic polypeptide"

SEQ ID NO: 1055 - protein, 124 aa, Artificial Sequence; identical to SEQ ID NO: 76
  source: /note="Description of Artificial Sequence: Synthetic polypeptide"

SEQ ID NO: 1056 - protein, 124 aa, Artificial Sequence; identical to SEQ ID NO: 77
  source: /note="Description of Artificial Sequence: Synthetic polypeptide"

SEQ ID NO: 1057 - protein, 124 aa, Artificial Sequence; identical to SEQ ID NO: 78
  source: /note="Description of Artificial Sequence: Synthetic polypeptide"

SEQ ID NO: 1058 - protein, 124 aa, Artificial Sequence; identical to SEQ ID NO: 79
  source: /note="Description of Artificial Sequence: Synthetic polypeptide"

SEQ ID NO: 1059 - protein, 124 aa, Artificial Sequence; identical to SEQ ID NO: 80
  source: /note="Description of Artificial Sequence: Synthetic polypeptide"

SEQ ID NO: 1060 - protein, 124 aa, Artificial Sequence; identical to SEQ ID NO: 74
  source: /note="Description of Artificial Sequence: Synthetic polypeptide"

SEQ ID NO: 1061 - protein, 124 aa, Artificial Sequence; identical to SEQ ID NO: 82
  source: /note="Description of Artificial Sequence: Synthetic polypeptide"

SEQ ID NO: 1062 - protein, 124 aa, Artificial Sequence; identical to SEQ ID NO: 83
  source: /note="Description of Artificial Sequence: Synthetic polypeptide"

SEQ ID NO: 1063 - protein, 107 aa, Artificial Sequence; identical to SEQ ID NO: 84
  source: /note="Description of Artificial Sequence: Synthetic polypeptide"

SEQ ID NO: 1064 - protein, 107 aa, Artificial Sequence; identical to SEQ ID NO: 85
  source: /note="Description of Artificial Sequence: Synthetic polypeptide"

SEQ ID NO: 1065 - protein, 107 aa, Artificial Sequence; identical to SEQ ID NO: 86
  source: /note="Description of Artificial Sequence: Synthetic polypeptide"

SEQ ID NO: 1066 - protein, 107 aa, Artificial Sequence; identical to SEQ ID NO: 87
  source: /note="Description of Artificial Sequence: Synthetic polypeptide"

SEQ ID NO: 1067 - protein, 107 aa, Artificial Sequence; identical to SEQ ID NO: 88
  source: /note="Description of Artificial Sequence: Synthetic polypeptide"

SEQ ID NO: 1068 - protein, 107 aa, Artificial Sequence; identical to SEQ ID NO: 89
  source: /note="Description of Artificial Sequence: Synthetic polypeptide"

SEQ ID NO: 1069 - protein, 107 aa, Artificial Sequence; identical to SEQ ID NO: 88
  source: /note="Description of Artificial Sequence: Synthetic polypeptide"

SEQ ID NO: 1070 - protein, 107 aa, Artificial Sequence; identical to SEQ ID NO: 84
  source: /note="Description of Artificial Sequence: Synthetic polypeptide"

SEQ ID NO: 1071 - protein, 107 aa, Artificial Sequence; identical to SEQ ID NO: 92
  source: /note="Description of Artificial Sequence: Synthetic polypeptide"

SEQ ID NO: 1072 - protein, 107 aa, Artificial Sequence; identical to SEQ ID NO: 93
  source: /note="Description of Artificial Sequence: Synthetic polypeptide"

SEQ ID NO: 1073 - protein, 120 aa, Artificial Sequence; identical to SEQ ID NO: 24
  source: /note="Description of Artificial Sequence: Synthetic polypeptide"
  VARIANT (18)..(18): /replace="Val"
  misc_feature (18)..(18): /note="Residue given in the sequence has no preference with respect to the annotation for said position"
  VARIANT (30)..(30): /replace="Asn" or "Thr" or "Gly" or "Ala"
  VARIANT (31)..(31): /replace="Trp" or "Tyr" or "Ile" or "Asn" or "Phe" or "Arg" or "Leu"
  misc_feature (30)..(31): /note="Residues given in the sequence have no preference with respect to those in the annotations for said positions"
  VARIANT (33)..(33): /replace="Thr" or "Ser" or "Pro" or "Gly"
  VARIANT (34)..(34): /replace="Thr" or "Val"
  VARIANT (35)..(35): /replace="Thr"
  misc_feature (33)..(35): /note="Residues given in the sequence have no preference with respect to those in the annotations for said positions"
  VARIANT (50)..(50): /replace="Trp"
  VARIANT (51)..(51): /replace="Thr" or "Met" or "Leu" or "Val" or "Asn"
  misc_feature (50)..(51): /note="Residues given in the sequence have no preference with respect to those in the annotations for said positions"
  VARIANT (55)..(55): /replace="Phe" or "Thr" or "Ile"
  VARIANT (56)..(56): /replace="Arg" or "Asp"
  VARIANT (57)..(57): /replace="Ser" or "Ala" or "Asn" or "Pro" or "Ile" or "Val" or "Lys" or "Phe"
  VARIANT (58)..(58): /replace="Pro" or "Ser" or "Gly"
  VARIANT (59)..(59): /replace="Ile" or "Thr" or "Ser" or "Val" or "His" or "Ala" or "Arg" or "Met" or "Leu"
  misc_feature (55)..(59): /note="Residues given in the sequence have no preference with respect to those in the annotations for said positions"
  VARIANT (65)..(65): /replace="Gln"
  misc_feature (65)..(65): /note="Residue given in the sequence has no preference with respect to the annotation for said position"
  VARIANT (79)..(79): /replace="Ala"
  misc_feature (79)..(79): /note="Residue given in the sequence has no preference with respect to the annotation for said position"
  VARIANT (99)..(99): /replace="Ser" or "Trp" or "Thr" or "Ala"
  VARIANT (100)..(100): /replace="Val" or "Ile" or "Phe" or "Arg" or "Gln"
  VARIANT (101)..(101): /replace="Phe" or "Val" or "Pro" or "His"
  VARIANT (102)..(102): /replace="Phe" or "Val"
  VARIANT (103)..(103): /replace="Asn" or "Glu" or "Thr" or "Ile" or "Ala"
  VARIANT (104)..(104): /replace="Thr" or "Phe" or "Arg" or "Gly" or "Asp"
  VARIANT (105)..(105): /replace="Ser" or "Ala" or "Lys" or "Arg" or "Ile" or "Tyr" or "Val" or "Pro" or "Asn" or "Gly"
  VARIANT (106)..(106): /replace="Trp" or "Ser" or "Pro" or "Ala"
  VARIANT (107)..(107): /replace="Phe" or "Met"
  misc_feature (99)..(107): /note="Residues given in the sequence have no preference with respect to those in the annotations for said positions"

SEQ ID NO: 1074 - protein, 108 aa, Artificial Sequence; identical to SEQ ID NO: 25
  source: /note="Description of Artificial Sequence: Synthetic polypeptide"
  VARIANT (1)..(1): /replace="Glu"
  misc_feature (1)..(1): /note="Residue given in the sequence has no preference with respect to the annotation for said position"
  VARIANT (4)..(4): /replace="Leu"
  misc_feature (4)..(4): /note="Residue given in the sequence has no preference with respect to the annotation for said position"
  VARIANT (11)..(11): /replace="Gln"
  misc_feature (11)..(11): /note="Residue given in the sequence has no preference with respect to the annotation for said position"
  VARIANT (28)..(28): /replace="Arg" or "Thr" or "Asn" or "Ile" or "Cys" or "Gly" or "Lys" or "Tyr" or "Trp"
  misc_feature (28)..(28): /note="Residue given in the sequence have no preference with respect to those in the annotations for said position"
  VARIANT (31)..(31): /replace="Arg" or "Thr" or "Gly" or "Asn" or "Lys" or "Cys" or "His" or "Val" or "Pro" or "Leu
  VARIANT (32)..(32): /replace="Arg" or "Thr" or "Asn" or "Cys" or "Gly" or "Ile" or "Lys" or "Met" or "Leu" or "Tyr" or "Pro" or "Val"
  misc_feature (31)..(32): /note="Residues given in the sequence have no preference with respect to those in the annotations for said positions"
  VARIANT (49)..(49): /replace="Lys"
  VARIANT (50)..(50): /replace="Tyr"
  VARIANT (51)..(51): /replace="Val" or "Pro" or "Thr" or "Gly" or "Ser" or "Glu" or "Asp"
  misc_feature (49)..(51): /note="Residues given in the sequence have no preference with respect to those in the annotations for said positions"
  VARIANT (55)..(55): /replace="Leu" or "Val" or "Thr" or "Ser" or "Met" or "Asn" or "Lys" or "Phe" or "Arg"
  misc_feature (55)..(55): /note="Residue given in the sequence has no preference with respect to those in the annotations for said position"
  VARIANT (76)..(76): /replace="Asn"
  misc_feature (76)..(76): /note="Residue given in the sequence has no preference with respect to the annotation for said position"
  VARIANT (91)..(91): /replace="Arg" or "Asn" or "Gly" or "Thr" or "Cys" or "Ile"
  VARIANT (92)..(92): /replace="Arg" or "Gly" or "Ile" or "Cys" or "Asn" or "Thr" or "Met"
  VARIANT (93)..(93): /replace="Arg" or "Ile" or "Cys" or "Gly" or "Asn" or "Thr" or "Lys"
  VARIANT (94)..(94): /replace="Leu"
  misc_feature (91)..(94): /note="Residues given in the sequence have no preference with respect to those in the annotations for said positions"
  VARIANT (96)..(96): /replace="Leu" or "Ala" or "Ser" or "Arg" or "Thr" or "Gln" or "His"
  VARIANT (97)..(97): /replace="Ser" or "Arg" or "Leu" or "Thr" or "Ala" or "Gln" or "His" or "Val" or "Met"
  misc_feature (96)..(97): /note="Residues given in the sequence have no preference with respect to those in the annotations for said positions"
  VARIANT (104)..(104): /replace="Lys"
  misc_feature (104)..(104): /note="Residue given in the sequence has no preference with respect to the annotation for said position"

SEQ ID NO: 1075 - protein, 117 aa, Artificial Sequence
  source: /note="Description of Artificial Sequence: Synthetic polypeptide"
  VARIANT (31)..(31): /replace="Asn" or "His" or "Tyr" or "Ile"
  VARIANT (32)..(32): /replace="Phe" or "Leu" or "Ser" or "Arg"
  VARIANT (33)..(33): /replace="Ser" or "Asn"
  misc_feature (31)..(33): /note="Residues given in the sequence have no preference with respect to those in the annotations for said positions"
  VARIANT (35)..(35): /replace="Thr" or "Ser" or "His" or "Gln" or "Tyr"
  misc_feature (35)..(35): /note="Residue given in the sequence has no preference with respect to the annotations for said position"
  VARIANT (50)..(50): /replace="Ile" or "Val" or "Leu" or "Arg" or "Lys" or "Ser"
  misc_feature (50)..(50): /note="Residue given in the sequence has no preference with respect to the annotations for said position"
  VARIANT (52)..(52): /replace="Arg" or "Gly" or "Ser" or "Ala" or "Leu"
  VARIANT (53)..(53): /replace="Ala" or "Ser" or "Asp" or "Glu" or "Val" or "Asn"
  VARIANT (54)..(54): /replace="Gly" or "Glu" or "Ala" or "Val" or "Gly" or "Tyr"
  misc_feature (52)..(54): /note="Residue given in the sequence has no preference with respect to the annotations for said position"
  VARIANT (56)..(56): /replace="Thr" or "Phe" or "Ala" or "Tyr" or "Trp"
  misc_feature (56)..(56): /note="Residue given in the sequence has preference with respect to those in the annotations for said position"
  VARIANT (58)..(58): /replace="Ala" or "His" or "Val" or "Ser" or "Asn" or "Gly"
  misc_feature (58)..(58): /note="Residue given in the sequence has preference with respect to those in the annotations for said position"
  VARIANT (60)..(60): /replace="Ala"
  VARIANT (61)..(61): /replace="Asp"
  VARIANT (62)..(62): /replace="Ser"
  VARIANT (63)..(63): /replace="Val"
  misc_feature (60)..(63): /note="Residues given in the sequence have no preference with respect to those in the annotations for said positions"
  VARIANT (65)..(65): /replace="Gly"
  misc_feature (65)..(65): /note="Residue given in the sequence has no preference with respect to the annotation for said position"
  VARIANT (98)..(98): /replace="His" or "Gln" or "Leu" or "Tyr" or "Asp" or "Asn" or "Thr" or "Pro" or "Ala" or "Ser" or "Arg"
  VARIANT (99)..(99): /replace="Ser" or "Leu" or "Cys" or "Arg" or "Phe" or "Asp" or "Tyr" or "Pro" or "Ile" or "Gly"
  VARIANT (100)..(100): /replace="Gln" or "Arg" or "Leu" or "Tyr" or "Pro" or "Ala" or "Val" or "Asp" or "Cys"
  VARIANT (101)..(101): /replace="Gln" or "Pro" or "Leu" or "Asn" or "Tyr" or "Arg" or "Thr" or "Asp" or "Ala" or "Cys"
  VARIANT (102)..(102): /replace="Arg" or "Ala" or Val" or "Trp" or "Glu" or "Ser" or "Pro" or "Ile"
  VARIANT (103)..(103): /replace="Thr" or "Ser" or "Gln" or "Ala" or "Lys"
  VARIANT (104)..(104): /replace="Leu" or "Gly" or "Asp" or "Glu" or "Trp" or "Arg" or "Pro" or "Ala" or "Ile"
  VARIANT (105)..(105): /replace="Asp" or "Val" or "Gly" or "Thr"
  VARIANT (106)..(106): /replace="Ser" or "Phe" or "Cys" or "Asn" or "Pro" or "Ile" or "His"
  misc_feature (98)..(106): /note="Residues given in the sequence have no preference with respect to those in the annotations for said positions"
EVQLVESGGGLVQPGGSLRLSCAASGFTFSDYGVNWVRQAPGKGLEWVSMIWGDGSTDYDSTLKSRFTISRDNSKNTLYLQMNSLRAEDTAVYYCAREWHHGPVAYWGQGTLVTVSS

SEQ ID NO: 1076 - protein, 107 aa, Artificial Sequence
  source: /note="Description of Artificial Sequence: Synthetic polypeptide"
  VARIANT (24)..(24): /replace="Arg"
  misc_feature (24)..(24): /note="Residue given in the sequence has no preference with respect to the annotation for said position"
  VARIANT (28)..(28): /replace="Ser" or "Val" or "Gly" or "Asp" or "Thr" or "Pro"
  misc_feature (28)..(28): /note="Residue given in the sequence has no preference with respect to those in the annotations for said position"
  VARIANT (30)..(30): /replace="Arg" or "Thr" or "Ile" or "Asn" or "Cys" or "Lys"
  VARIANT (31)..(31): /replace="Arg" or "Asn" or "Gly" or "Cys" or "Thr" or "Ile"
  VARIANT (32)..(32): /replace="Pro" or "Thr" or "Gly" or "Val" or "Ser" or "Arg"
  VARIANT (33)..(33): /replace="Leu"
  misc_feature (30)..(33): /note="Residues given in the sequence have no preference with respect to those in the annotations for said positions"
  VARIANT (50)..(50): /replace="Ser" or "Arg" or "Leu" or "Cys" or "Gln" or "Gly"
  misc_feature (50)..(50): /note="Residue given in the sequence has no preference with respect to those in the annotations for said position"
  VARIANT (53)..(53): /replace="Ser" or "Ile" or "Leu" or "Lys" or "Ala" or "Arg"
  VARIANT (54)..(54): /replace="Leu"
  VARIANT (55)..(55): /replace="Gln" or "Thr" or "Ala" or "Glu" or "Phe"
  VARIANT (56)..(56): /replace="Ser"
  misc_feature (53)..(56): /note="Residues given in the sequence have no preference with respect to those in the annotations for said positions"
  VARIANT (91)..(91): /replace="Ser"
  VARIANT (92)..(92): /replace="Asn" or "Phe" or "Asp" or "Gly" or "His"
  VARIANT (93)..(93): /replace="Arg" or "Gly" or "Thr" or "Ile" or "Cys"
  VARIANT (94)..(94): /replace="Ser" or "Pro" or "Met" or "Ile" or "Ala"
  VARIANT (95)..(95): /replace="Thr" or "Arg" or "Leu" or "Gln" or "Ala" or "Ser"
  VARIANT (96)..(96): /replace="Tyr"
  misc_feature (91)..(96): /note="Residues given in the sequence have no preference with respect to those in the annotations for said positions"
DIQMTQSPSSLSASVGDRVTITCKASQAVSSAVAWYQQKPGKAPKLLIYWASTRHTGVPSRFSGSGSGTDFTLTISSLQPEDFATYYCQQHYSTPFTFGQGTKLEIK

SEQ ID NO: 1077 - protein, 124 aa, Artificial Sequence
  source: /note="Description of Artificial Sequence: Synthetic polypeptide"
  VARIANT (2)..(2): /replace="Val"
  misc_feature (2)..(2): /note="Residue given in the sequence has no preference with respect to the annotation for said position"
  VARIANT (30)..(30): /replace="Asn" or "Ala" or "Ser" or "Arg" or "Asp" or "Lys" or "Pro" or "Gln" or "Met" or "Gly" or "Glu"
  VARIANT (31)..(31): /replace="Asp" or "His" or "Thr" or "Ser" or "Gln" or "Lys"
  misc_feature (30)..(31): /note="Residues given in the sequence have no preference with respect to those in the annotations for said positions"
  VARIANT (34)..(34): /replace="Ile"
  VARIANT (35)..(35): /replace="Ile" or "Thr" or "Gln" or "Ser" or "Gly" or "Ala" or "Val"
  misc_feature (34)..(35): /note="Residues given in the sequence have no preference with respect to those in the annotations for said positions"
  VARIANT (55)..(55): /replace="Asn" or "Ser"
  misc_feature (55)..(55): /note="Residue given in the sequence has no preference with respect to those in the annotations for said position"
  VARIANT (57)..(57): /replace="Lys" or "Val" or "Gln" or "Arg" or "Leu" or "Ser" or "Asn" or "Ile" or "Asp" or "Ala"
  misc_feature (57)..(57): /note="Residue given in the sequence has no preference with respect to those in the annotations for said position"
  VARIANT (59)..(59): /replace="Ser" or "His" or "Asn" or "Met" or "Lys" or "Ala" or "Arg" or "Gln" or "Asp"
  misc_feature (59)..(59): /note="Residue given in the sequence has no preference with respect to those in the annotations for said position"
  VARIANT (62)..(62): /replace="Gln"
  VARIANT (63)..(63): /replace="Gly" or "Lys"
  VARIANT (64)..(64): /replace="Leu"
  VARIANT (65)..(65): /replace="Thr" or "Gln"
  misc_feature (62)..(65): /note="Residues given in the sequence have no preference with respect to those in the annotations for said positions"
  VARIANT (68)..(68): /replace="Val"
  misc_feature (68)..(68): /note="Residue given in the sequence has no preference with respect to the annotation for said position"
  VARIANT (70)..(70): /replace="Met"
  misc_feature (70)..(70): /note="Residue given in the sequence has no preference with respect to the annotation for said position"
  VARIANT (72)..(72): /replace="Thr"
  misc_feature (72)..(72): /note="Residue given in the sequence has no preference with respect to the annotation for said position"
  VARIANT (95)..(95): /replace="Tyr"
  misc_feature (95)..(95): /note="Residue given in the sequence has no preference with respect to the annotation for said position"
  VARIANT (99)..(99): /replace="Arg" or Asn"
  VARIANT (100)..(100): /replace="Leu" or "Tyr" or "Ile" or "Val" or "Cys"
  VARIANT (101)..(101): /replace="Phe" or "Met" or "Arg" or "Ser" or "Trp" or "Gln" or "Val" or "Asn" or "Gly" or "Cys"
  VARIANT (102)..(102): /replace="Asn" or "Lys" or "Ser" or "Arg" or "Leu" or "Pro" or "Phe" or "Asp" or "Met" or "Ala"
  VARIANT (103)..(103): /replace="Pro" or "Val" or "Ser" or "Ala"
  VARIANT (104)..(104): /replace="Met" or "Glu" or "Ala" or "Arg" or "Ile" or "Gln" or "Gly" or "Asp"
  VARIANT (105)..(105): /replace="Asp" or "Ala" or "Glu" or "Ser" or "Met" or "Ile" or "Pro"
  VARIANT (106)..(106): /replace="Ala" or "Glu" or "Met" or "Asp" or "Gly" or "Ile" or "Gln" or "Pro" or "Asn" or "Leu" or "His"
  VARIANT (107)..(107): /replace="Ser" or "Met" or "Asn"
  VARIANT (108)..(108): /replace="Glu"
  VARIANT (109)..(109): /replace="Asn" or "Ser" or "Cys" or "His" or "Asp" or "Ile" or "Phe" or "Val" or "Leu" or "Ala"
  VARIANT (110)..(110): /replace="Thr" or "Arg" or "Cys"
  misc_feature (99)..(110): /note="Residues given in the sequence have no preference with respect to those in the annotations for said positions"
EIQLVQSGAEVKKPGASVKVSCKASGYTFTNYGMNWVRQAPGQGLEWMGWINTYTGEPTYADDFKGRFTFTLDTSTSTAYMELSSLRSEDTAVYFCARKFLTTVVVTDYAMDYWGQGTTVTVSS

SEQ ID NO: 1078 - protein, 107 aa, Artificial Sequence; identical to SEQ ID NO: 959
  source: /note="Description of Artificial Sequence: Synthetic polypeptide"
  VARIANT (28)..(28): /replace="Asn" or "Glu" or "His" or "Gly" or "Val" or "Arg" or "Ala"
  misc_feature (28)..(28): /note="Residue given in the sequence has no preference with respect to those in the annotations for said position"
  VARIANT (30)..(30): /replace="Tyr" or "Glu" or "Ala" or "Thr" or "Trp" or "Gly" or "Asn" or "Phe" or "Cys"
  VARIANT (31)..(31): /replace="Gln" or "Ser" or "Lys" or "Thr" or "His" or "Asp" or "Arg"
  VARIANT (32)..(32): /replace="Val" or "Phe" or "Thr"
  misc_feature (30)..(32): /note="Residues given in the sequence have no preference with respect to those in the annotations for said positions"
  VARIANT (43)..(43): /replace="Ala" or "Val"
  VARIANT (44)..(44): /replace="Pro"
  misc_feature (43)..(44): /note="Residues given in the sequence have no preference with respect to those in the annotations for said positions"
  VARIANT (50)..(50): /replace="Phe" or "Asn"
  VARIANT (51)..(51): /replace="Ala"
  misc_feature (50)..(51): /note="Residues given in the sequence have no preference with respect to those in the annotations for said positions"
  VARIANT (53)..(53): /replace="Leu" or "Lys" or "Gly"
  misc_feature (53)..(53): /note="Residue given in the sequence has no preference with respect to those in the annotations for said position"
  VARIANT (71)..(71): /replace="Phe"
  misc_feature (71)..(71): /note="Residue given in the sequence has preference with respect to the annotation for said position"
  VARIANT (87)..(87): /replace="Tyr"
  misc_feature (87)..(87): /note="Residue given in the sequence has preference with respect to the annotation for said position"
  VARIANT (92)..(92): /replace="Ile"
  VARIANT (93)..(93): /replace="Ser" or "Met" or "Ile" or "Ala" or "Arg"
  VARIANT (94)..(94): /replace="Trp" or "Gln" or "Pro" or "Met" or "Arg" or "Phe" or "Gly" or "Val" or "Tyr" or "Ala"
  misc_feature (92)..(94): /note="Residues given in the sequence have no preference with respect to those in the annotations for said positions"
  VARIANT (96)..(96): /replace="Thr" or "Ser" or "Ala"
  misc_feature (96)..(96): /note="Residue given in the sequence has no preference with respect to those in the annotations for said position"

1. A binding protein comprising at least one heavy chain variable region (VH region) comprising:
(a) three complementarity determining regions (CDRs) from any one of SEQ ID NOS: 22, 24, 26, 28, 30, 32, 34-58, 74-83, 94-266, 478-486, 496-675, 738-762, 778-956, 1053-1062, 1073, 1075, and 1077; or
(b) any one of SEQ ID NOS: 22, 24, 26, 28, 30, 32, 34-58, 74-83, 94-266, 478-486, 496-675, 738-762, 778-956, 1053-1062, 1073, 1075, and 1077.

2. A binding protein comprising at least one light chain variable region (VL region) comprising:
(a) three complementarity determining regions (CDRs) from any one of SEQ ID NOS: 23, 25, 27, 29, 31, 33, 59-73, 84-93, 267-477, 487-495, 676-737, 763-777, 957-1052, 1063-1072, 1074, 1076, and 1078; or
(b) any one of SEQ ID NOS: 23, 25, 27, 29, 31, 33, 59-73, 84-93, 267-477, 487-495, 676-737, 763-777, 957-1052, 1063-1072, 1074, 1076, 1078.

3. A binding protein comprising at least one heavy chain variable region (VH region) and at least one light chain variable region (VL region), wherein the VH region comprises:
(a) three complementarity determining regions (CDRs) from any one of SEQ ID NOS: 22, 24, 26, 28, 30, 32, 34-58, 74-83, 94-266, 478-486, 496-675, 738-762, 778-956, 1053-1062, 1073, 1075, and 1077; or
(b) any one of SEQ ID NOS: 22, 24, 26, 28, 30, 32, 34-58, 74-83, 94-266, 478-486, 496-675, 738-762, 778-956, 1053-1062, 1073, 1075, and 1077; and
the VL region comprises:
(c) three CDRs from any one of SEQ ID NOS: 23, 25, 27, 29, 31, 33, 59-73, 84-93, 267-477, 487-495, 676-737, 763-777, 957-1052, 1063-1072, 1074, 1076, and 1078; or
(d) any one of SEQ ID NOS: 23, 25, 27, 29, 31, 33, 59-73, 84-93, 267-477, 487-495, 676-737, 763-777, 957-1052, 1063-1072, 1074, 1076, 1078.

4. The binding protein of claim 3, wherein the binding protein comprises two VH regions and two VL regions.

5. The binding protein of claim 3, wherein the binding protein comprises at least one VH region and at least one VL region comprising a set of amino acid sequences selected from the group consisting of SEQ ID NOS: 22 and 23; 24 and 25; 26 and 27; 28 and 29; 30 and 31; and 32 and 33.

6. The binding protein of claim 4, wherein the binding protein:
(a) modulates a biological function of TNF-α;
(b) neutralizes TNF-α;
(c) diminishes the ability of TNF-α to bind to its receptor;
(d) diminishes the ability of pro-human TNF-α, mature-human TNF-α, or truncated-human TNF-α to bind to its receptor; and/or
(e) reduces one or more of TNF-dependent cytokine production, TNF-dependent cell killing, TNF-dependent inflammation, TNF-dependent bone erosion, and TNF-dependent cartilage damage.

7-9. (canceled)

10. The binding protein of claim 3, wherein the binding protein comprises:
(a) a heavy chain constant region comprising an amino acid sequence of SEQ ID NO:2 or SEQ ID NO: 3;
(b) a light chain constant region comprising an amino acid sequence of SEQ ID NO:4 or SEQ ID NO: 5;
(c) a heavy chain variable region (VH region) comprising an amino acid sequence selected from the group consisting of SEQ ID NO: 22, 24, 26, 28, 30, 32, 34-58, 74-83, 94-266, 478-486, 496-675, 738-762, 778-956, 1053-1062, 1073, 1075, and 1077; and
(d) a light chain variable region (VL region) comprising an amino acid sequence selected from the group consisting of SEQ ID NO: 23, 25, 27, 29, 31, 33, 59-73, 84-93, 267-477, 487-495, 676-737, 763-777, 957-1052, 1063-1072, 1074, 1076, and 1078.

11. The binding protein of claim 3, wherein the binding protein comprises an immunoglobulin molecule, an Fv, a disulfide linked Fv, a monoclonal antibody, an scFv, a chimeric binding protein, a single domain binding protein, a CDR-grafted binding protein, a diabody, a humanized binding protein, a multispecific binding protein, an Fab, a dual specific binding protein, an Fab′ fragment, a bispecific binding protein, an F(ab′)2 fragment, a DVD-Ig™, a bivalent fragment comprising two Fab fragments linked by a disulfide bridge at the hinge region, a Fd fragment consisting of the VH and CH1 domains, a Fv fragment consisting of the VL and VH domains of a single arm of an antibody, a dAb fragment, an isolated complementarity determining region (CDR), or a single chain binding protein.

12. The binding protein of claim 4, wherein the binding protein is conjugated to an imaging agent selected from the group consisting of a radiolabel, an enzyme, a fluorescent label, a luminescent label, a bioluminescent label, a magnetic label, and biotin.

13. The binding protein of claim 4, wherein the binding protein further comprises a therapeutic or cytotoxic agent selected from the group consisting of an anti-metabolite, an alkylating agent, an antibiotic, a growth factor, a cytokine, an anti-angiogenic agent, an anti-mitotic agent, an anthracycline, toxin, an apoptotic agent, and at least one additional therapeutic agent for treating a disorder in which TNF-α activity is detrimental.

14. An isolated nucleic acid encoding a binding protein comprising the amino acid sequence of claim 3.

15. A vector comprising the isolated nucleic acid of claim 14.

16. A host cell comprising the vector of claim 15.

17. A method for producing a protein that binds TNF-α, the method comprising the steps of culturing the host cell of claim 16 in a culture medium under conditions sufficient to produce a binding protein that binds TNF-α.

18. A pharmaceutical composition comprising the binding protein of claim 3, and a pharmaceutically acceptable carrier.

19. A method for treating a mammal comprising administering to the mammal an effective amount of the pharmaceutical composition of claim 18.

20. A method for reducing human TNF-α activity, the method comprising contacting human TNF-α with the binding protein of claim 3 such that human TNF-α activity is reduced.

21. A method for reducing human TNF-α activity in a human subject suffering from a disorder in which TNF-α activity is detrimental, the method comprising administering to the human subject the binding protein of claim 3 such that human TNF-α activity in the human subject is reduced and/or treatment is achieved.

22. A method for treating a patient suffering from a disorder in which TNF-α is detrimental comprising administering to the patient the binding protein of claim 3 either before, concurrent, or after the administration to the patient of a second agent, wherein the second agent is selected from the group consisting of an antibody, or fragment thereof, capable of binding human IL-12; PGE2; LPA; NGF; CGRP; SubP; RAGE; histamine; a histamine receptor blocker; bradykinin; IL-1alpha; IL-1beta; VEGF; PLGF; methotrexate; a corticosteroid, a glucocorticoid receptor modulator; cyclosporin, rapamycin, FK506, and a non-steroidal anti-inflammatory agent.

23. The method of claim 21, wherein the disorder is an autoimmune and/or inflammatory disorder.

24. The method of claim 23, wherein the disorder is selected from the group consisting of Crohn's disease, psoriasis, plaque psoriasis, arthritis, rheumatoid arthritis, psoratic arthritis, osteoarthritis, or juvenile idiopathic arthritis, multiple sclerosis, and ankylosing spondylitis.

25. The method of claim 23, wherein the disorder is selected from the group consisting of a respiratory disorder; asthma; allergic and nonallergic asthma; asthma due to infection; asthma due to infection with respiratory syncytial virus (RSV); chronic obstructive pulmonary disease (COPD); a condition involving airway inflammation; eosinophilia; fibrosis and excess mucus production; cystic fibrosis; pulmonary fibrosis; an atopic disorder; atopic dermatitis; urticaria; eczema; allergic rhinitis; allergic enterogastritis; an inflammatory and/or autoimmune condition of the skin; an inflammatory and/or autoimmune condition of gastrointestinal organs; inflammatory bowel diseases (IBD); ulcerative colitis; Crohn's disease; an inflammatory and/or autoimmune condition of the liver; liver cirrhosis; liver fibrosis; liver fibrosis caused by hepatitis B and/or C virus; scleroderma; tumors or cancers; hepatocellular carcinoma; glioblastoma; lymphoma; Hodgkin's lymphoma; a viral infection; a bacterial infection; a parasitic infection; HTLV-1 infection; suppression of expression of protective type 1 immune responses, and suppression of expression of a protective type 1 immune response during vaccination.

26. A method for determining the presence of TNF-α or a fragment thereof in a test sample by an immunoassay, wherein the immunoassay comprises contacting the test sample with at least one binding protein or fragment thereof according to claim 3, and at least one detectable label.

27. The method of claim 26, wherein the method further comprises:
(i) contacting the test sample with the at least one binding protein or fragment thereof, wherein the binding protein binds to an epitope on the TNF-α or fragment thereof so as to form a first complex;
(ii) contacting the complex with the at least one detectable label, wherein the detectable label binds to an epitope on the first complex, or on the TNF-α or fragment thereof, that is not bound by the binding protein or fragment thereof, to form a second complex; and
(iii) detecting the presence of the TNF-α or fragment thereof in the test sample based on the signal generated by the detectable label in the second complex, wherein the presence of the TNF-α or fragment thereof is directly correlated with the signal generated by the detectable label.

28. The method of claim 26, wherein the method further comprises:
(i) contacting the test sample with the at least one binding protein or fragment thereof, wherein the binding protein or fragment thereof binds to an epitope on the TNF-α or fragment thereof so as to form a first complex;
(ii) contacting the complex with the at least one detectable label, wherein the detectable label competes with the TNF-α or fragment thereof for binding to the binding protein or fragment thereof so as to form a second complex; and
(iii) detecting the presence of the TNF-α or fragment thereof in the test sample based on the signal generated by the detectable label in the second complex, wherein the presence of the TNF-α or fragment thereof is indirectly correlated with the signal generated by the detectable label.

29. The method of claim 26, wherein the method optionally further comprises diagnosing, prognosticating, or assessing the efficiency of therapeutic/prophylactic treatment of the patient.
